United States Patent Application Publication US 2025/0092353 A1 - sequence listing, part 2

SEQ ID NO: 12 - DNA, 1218260 bp, Kazachstania heterogenica
  source 1..1218260: mol_type = genomic DNA
tttttccctgggttgagcaaagatactttaagagacttattacttgatcaaacttttaattttacctgtgtttaatgctcttggagctgtggtgttttatccataataagcaggaagcaaagaggaaggaaaggggaatagttcacgaaaagaagagatgaccaaatcatatagtatttatttttatatctttagggatatgaacaatttaacaaaaaaaaagtcaagacatttataacaaaaatatcaagacatttagaaaaaaaacatcaaaacatttataacaaaacaaattgtagattgaaataaaagtattgttctcttggttataataagcaataaaagacaaatatttttacaaaaaactatggtaaccgttgataacagttaaaacccctgagatcaaggacgtttgtctttgtcgagatgaaaataaaaataaaaaaagaaacaaaagcgcttagtataataaacgaattcagggaaaagcacttgatttttaagattcttggtcattaaaaatgtttattggtaaaaaatgctttataataagataagagaacttacatcaactctttgctaaaaaaaccaatggaaaaaaggacaaatacgcaatgcatgtcctattgtcgcacaagaatatccagatttgtataagatttgtccaacagttctgaaggaactgtaaaaaaacactttcaaagttagctttttctggaatttttttttctactctggaaataatagaaataaaacagtattttcggtaaatacagtgagagaattaaaaatttcttttcccgttaaggcatacaaaagaaagaaaggaaaggaaaaggggtaaaggcaaaaatagagtttcaaaaaagtgcttttatcttcaatagttttccaaagacttaccaaggagcagcgcaacaaataatagtataatagaataaaataagacaacaaataataaaagaataaaaacgatggtaacaatgaaagaaaatagtaccagtaagtgttgcccaaaaaaattgatagatctctcttacgtgttgcatatacataatatcggcaaataactttagaagaatagattatttttggaatattagatggaacaatgttatttgtagaaaaacataagatgtgagattgaatagtgagattttttgacctattgagaattattttcctacagtgtatgtatttttaataaaataataaaagcaagattactattttaaaattgtaaccttcaaaaatttttgaacatccataaaaatatgtctttcaagaaaaaaatttggaaaataaaacaagaagtttcaaatcttttgtttttgactttctttttcttatttgtctgttttaaatttcctttctagtatatcccccaccccaacaaacttggaaaaacaaaagaactgatcatattatgatctgaaaatttatagtaaaaaagtcgtttttaaaagagtagatgttgctttttttggggattttttttgtttttgttttaaaaaaatttttcaatgttccgtgaatgatatcatccagaggtagacaaaagttatgcacggtttatttgatgccatatgtattgttctttttattaaagattttgatcgttccctaaaaccggttcatatgattattgaatacaaaagcatcttttaattgaggtataataatatcgtactattttttactattaacatgcacttacaaccaattagcacggcacaattgtatattggaacaactaaactagagtttaaaaaaactggattttttgtattgaatttaggtgatgaaaaattttttatcatggaactattgttatatcaatatgtctggtgatgtcaagtatcagtatcaaacactttgatcttatttattacaagctaatagaacaaaataatagaaaatagcaataagacattaacgatattataggttatcagctatttattgaatgttattggtactataaatatatcttattattgtgcatgtccttttgttttacacaatgatcatacaagatatatcaatatgcagtgtaactttttttgccttagattcctcttttctacatgtttttataaatttgtgtttatgtactactataaatttacattatcaaagatatctataattacaactcaataataaaaattaagaggtgttgccttaatttctcatattgttaaaaataacatatcggtaatttactcccgataccaacaattaccacattcctttttcttcttagaattactctggtcattacctgctcttactttacttcttctaccattcaaactttcactaataccttatctttattattaatacagtcacccttgaaaatccctagatacttctttcttaaggcttatcatatttcccatatttctagttttgttcattcttttaatttctctttccaatactttattaagttattatactgtttcatttatccaccattctccctcttttacacatatgatactcacaccacatcttactaagaagtactaattgaactcctaaaatacatagtctgcaggtaacgttgaatcttaaggcaaaggacttggaacagttaaaagactaggtacaggctgtgaatgtattcgaacgagcaatcgttggactaatgttggtggcaaataacttgaaaacttatttaagaagccgtcgattactgagagtcctctggatgaataatattagtacacatgtctttaacgtcggtgatcatattatatgttattattatgttaacatgtagagttattttccctcgatcttttatttggggattaatagttatattgttagaatacagatagtacgtctattaggtttccttattaaagactgttttattatattgttaataataatcaaaagagaaaaatatttttcaagaagaaaaattttaagaaaaaaaaaattttaagaaaagaatcaaaagagagaccattttatatttgtttataacatattatgtaattatatacattatttttataggtctttaataaaccagagatccaatttactaatacgttaggtcatgactgtatcaaatacaaacactactactttctatgatatataaatataaaagaagcatacaatataacgtaatttatccaggttggaaaattaataactaaagtcatctacttatatgtgtttaccttttagaagtttttcataatatgttgatttattttcattctgtgtggtcttatctccctaatattgattgtgcaaaacaaacatttttcctctttgatatatttacatgtttctcatgccactaatacatcatttcagcaataaatctacaaaatgcttaagctggatattttttggttacttctgactatatttatttttttaaggacaactaatgaaaaaactcagaagattaaaacaatatttttgcccacaatattatttagtaaatataggattatggaattaattgttcagaaaaaatgtaagtctaaggagttattatcaagtttattatctaagcaaaaagaattttaaagaacatgccatattgagtatacgattatttgagtccccactgtttcttaacatttttgttgaggaaaaagagttaacaattaattttctttatattgtatacaatatatgcaaagatatggtctattattccaaatttttgtgttgaatatgaagatggtacaaaaagtttcactctatgctgttttatttttgaaacaaaaaaatcacccttcttacagcgtattaaaaaacaagacaagattttgaagacctaataataatgaataacttagttcctacacaaataattgcacataaatgaaatatcttaagaacacttacataacttatcaattaatgaatagacaattactccaaattcttaaataaaagttgtaatttgtgaatatttggctgtttttttatagtcaatttggtttattcattttatagttcttacttgaatatatattctttttcaaaattattacctgtacatattgaaataaagtatgcacctacccaattctaactattttgtagttaaaaatgtgaaaaaattaacgtaaaactcttcctatatctactttcaacctagtgcttgaacagtattacagaacaacataaataaaataaaaatattgtacaaagaatgccttgcctttagatacataaatattgagtattcttttttatgaacaacaaagaatatccaactacttcatggtaaatactcatacaataaggcataaaatatatataaatttttatttatttttaaacaaaatacaaggggagataatatatacgtaatagttatcagcttccattgtaactagtaatcgaattaaatctataagaaacacgcctacactttcattttggttttcttaaaaacaatgtcaggcactaaaagtatctatttttagggtaaaagcaccatatcttttcttaaaccctactttattttcatctaataaatgagaattttcgaaaatattaactcaaagagctcgacaatcgtataagaaaaaacaatagaaggcacaactattctataccacaccagtttggaattgttaaaatataatatatagccaactgtacaaatggaaaaaagaacctagatcttattgtcactctagttccatgttagagtatcatggattttttttcctgtgtattggcaaaatacatgagatataactgaatatccgtctctaaatttccacagtatataaactggtctttattaatttgtttcatttatttttaacaaattttgtaaatctctttttttatcatacttgttcttatttctttctcacctaaatatctacagatagaaattaacaaaaaataataatataaatttatctaaagtcaaataatatgaaatattacctgtttgatattattaaaacgcacacaccaattgtgtggtccttagtgggattgcatgtaaccaaaagaagtgttgctgttaccgtcccagatatcaaatttactatagttccaactggttcttttattaacacaggtactattgccaatgaaacagttgataaaggcagtaccatgaataggttcctatagcttggtactataacgaataatggtgtcatcaataaccaatagattctacggcatatctactggattaaattcaaaggtattatcttcaataattttctcatagataggtaaagtcactggtaagaagagtgtttatctaattaattcaaaagctatgccgaatttagttacagttaaaaatcctatcatatctattctcagttccttggggatatattatcatacagataaccagtacttagatactattgaaaaaaatttttatcaagtagctgtactttcattatgttctagctaaactacttttacaacattagcctattctctatactattaagcttgtcaatagcgacagctctttattatcagaatactgaaattattgtactgattacttcagttccatctgccttgcataccaccaccactggtaatatctctactttaaccacaattacatcaatttatgcttccacactaatacgaaaatgaatctttttcagtagatattgttgttattgttgtcactccatctctctctagcaccaacaccattcactattagtggaaagttcactaacaatgagaactaaccaacacctagctgttgcaaagcatcatttgcggttgttattagatctacaagaagtaatatacacatcacagaatatagccggtattgttgttattattcctgtttctagtttgttaaattggatactattggttactaaagtagtttgaacattgccctttgttaacccaaaacagtagtaatatatgatatattgttgctagatgttggttggttttcattgttagtggatattttaactatagccacggtgtagatgatagattaagacggagtaacaacaacaacaataacattggctggtaaagatttgttgttgtctgtaactgtagtagtctagattaatatagctgtgggtactccaacttcattaagaatctttaaggattcagaaatttttgtgtcatatctaacatacaggaaatctacaattttttgtaaaaaaaactgaaactgcttaaggtgacacttcaatggttttaagttcagtagtttacaaagtcacaaaaaccataatttattttctagaactacctagaaattccataacaattgtgattatcattattgaatgtaatggtgttgaacctgtttataataaaaaataggaccaaaaagaagaaaccaacttatttttacagaacacctatgtctttaattagtgaacttattagattcataattcatatatgttgtccttttttgtttgtatatagtatatgttagaatataaacagtatgcctattagattttcttattaaagactgttttattatgtcgttaataatagtaattaaaagagaaaaatatttttcaagaagaaaaattttaagaaaaaaaaattttaagaaaagaatcaaaagaagagagatcattttatatttgtttataacatattatataattatatacattactttaatatgtttttaataaaccagagatccaatttactaataagttaagtcatgactgtattaaatacaaacaccacgactttccaagaaataaaacgcgatgtcatacagtaaacaatatgctacaactccaaacaaccagtgtctcatctttagtcataaaaaatatttcttactaatatactaaatactgttttttatatgatagtactctggtattaactggtttgaactcgaatagaacattatgaaatcgctatactgatgttttttatcatataaatttcgcgaatcctcattaacttttactttaaactctatttggactacaacaaaaatatcttttatagatatttctgctggaatgatatattactggtttgagaaacatgtaattatatcaaagaagaaaaatgtttgttttgcacaatcaatattacagagacaagatcaaacagaatcaaaataaattaatatattatgaaaaattgctaaaaggtaaacacatataagtagacgactttacttattaattttgcaacctggataaattacgttatattgtatgcttcttttacatttatataattattaattccaaaataagagatcgaggggaaattactctacatattgacatcacaatgacatataatatgatcaccaacgctaaacacatgtatactaatattattcatccagaggaaacacaaccttgtttaatacatgtattggttctatccaaatattatgaagatgcagtagcaattcttactaatcaacactatctgcatgacgaattttcagtaaccaaaacacaacttggcattattgtaattttctgaaaaacagaatgaagaatttttatatttccagaaaagtaacatctacacttgtaatgtgaattcaaattggtggtgctatattaaaataaaaaaattggaagtattagaaaaaattgaaatttctttgaaaatttttcttatctattattgtttatatttagctaactcaaatttttcctttttttcatgaaagatttttttgtttgtacgttccagtaaaacagaaaaacatcctcttgtcatgtaaacacacattcagaccaattaccacagaaacctcatttcacttttcaattattctgtaataacaaaagcaaagaaaatttttgacaaaagtaaaaatacttaattccaatttctaaccggttaaattttgtctacatttggacaaatttttgtctgattgtttaacttttttagaatgaaaaactacaacaagtttgattgttcaactcttcttctatcaaacgagggattgaatatagttttgcaactcaacaaagaaactaattttctgcttgaacccatatcaagatgaattaattatattttcctgttttaatatgaatatagtaagtaagtagaaaaaacaagttattatcttctttaagaaggttattcttcagtatttatctaatctatagcatttatttgttggaatgtactttgtttaattccacgagcaaaatgaccaacaaagtttatttctttttttagttagcaaccgtcctagagtgattgttgttattttttgtcccaaggacttgtgttaggttttattttttaaattgtaagtcaattctttacaaaagccatagaactttagggttgtttttaaattgtcatttttagacatattacgaaacttaggaataaaaatacctcatttcagttactaacagaaatattcctaaatactagtacaagaagatgctttggacaacaataaatcccataatctaaaaataaaaaacatgcttaaaaatagttcattgtatactatctattatagtcatttcattcaaccaccaattggcaaacaaaaaacaaaaagaaatgctctgttatcaagtcttgctactttaaaaagatacaaactttttatcaccctttgacctagtataaataaacaacatcataacaataggtcgaatataataataatcatctttttttcttgtttgtcttaaaattaaaccaaatagctatcattaaacgacattgtaaaagattttaaggattccacaaggtatacgtcattttttctagttcaatagtactcttgcatgtcttacatattgtgtatccgaaaaggagaaaaaaatactccactcaaatggagaatattgaattttacaaattatattgttcttatactagatcggaaaaaagagaaaaaatcggaaataggaatatcacagtaaaaagtctaattgagacccaaatctgccaggagaataatcatattttagatctctatcataatagatgctctaatagaacagtaataactttaaataataaattcttggttaacaaaagaacaattttactacatttgttgaatattataaaaaatattactacatgctaacgtcatataaggtgctgattcttgcaatacgaactaaaaaaagaaaaaaaattgttgatggttcttatagtatataactttatataacttatgtataaacagtaacaatgcaataaaaattctttacccctttttttaaattatacattcctatttgatcccacggtcactaccaaaaattttaatatcctattgtgaatgaagtaataaattttggacattctatagatcgatttactatagaatattgtgatatatacaaaaaagagatataaatgccaaataactaattaatcaggggcgatgatcctgtaagagtggggattctctaaaataattcaggagcaaaaattcaaaaatagaacacaaagagacaggtatatctatagtgtggttagaattgtctgtattgtctcttttcccacttgtgtattttttttcttcacttttattctttttgtcgttgcatcaaatacaaagacgattgtttccaacacaatagcaaaaaggaaaaaaattatttgtccattcttaaacttgtaaattttcccttttatgttcttcaaaagtaaaatatctagacaaaaatgattctattgttctgcaacgtgaaaatgcccaaacaataaacaatatttttaattctctatttggaaatgtttttgagaactcaatattttctgtttcctttttcgtttaaagaaatcaccacacactgattttttcctattagacataacagaataattgactacgctgtgtttttatgctttacttggatttttagtccaattgttgaagattacaaatctttttcttcattctttgtttctactcctttacacacttttattattgaagatttatggtaaaactttatttgtattttattcttgttcagtcaaaaaatcagaacctattagacaatcatttttattgtaagtcatgagcacatttttatataaaactactatggattatgtctgaatattctttcgtttcttgcttctcttcttgcaggcatgagcatcatctcgttatactcccagatgctaccagtataacagaactaagtatatcacctcaaataactaaaaaaaactaacgccataaagtctacgcaccaagctatatattttactgaaaagtcaataattccaaatatttgaaaataatataatggtctcaagtgccttatcattgtgcgcggcactgcttttagctgctttttctgctgtgtcgaaggcgcaaataggttatactactatttatgttagttcgttcagtcctttaccttatgttaatccacattctggagctccgggtcctattgtaacagtggacggaataccttttaatgatccgtataatgcatctagggatgctaagtgtttgatgtccccagaacaacaggctgctgttcttctcgaacataatttgtacagatctatgtttgtcgatactcctaatgtgacctggaatgatgagttagcccaacgagcagcgtggtgggtttgcagtggtcgttggaggtctcatccagacgttccatattggggctacgttgttggctcaaacgaatacgcgggaaatggtcctccagtcgccggtgtaaccgcctggtttgatgaaattggtttgtataattacaacgatccttactcggtcgatagcgatgaggctggacattttacacaacttgtctggaaaggtaccacggagattggttgtgctacactagagtatgctccctatatgtatgttcttgtgtgtcagtacttgcctgctggtaatatacttggtgaataccatgaaaatgtcatgcctctgaaaccagcttataaaggtgttaatcgtgatcccgctacacttccctgggcaatcctatctctagaaggaccacctaggactcaacccgcagttaccttatctgtgacatcaaatcctaaccctgtttacacaatacctcctggagagtggtcagacttctttccatcaacagcccagtttacttatttaagtgccactgacagtttaactaccactgcaacaacatccacctcaaacagtaatggttctactatgaataccactgacagatcaaccaccacttctaacaaatctacttcaagtaacagtcatagttctgctatagataccactgacagatcaaccaccacttctaacaaatctacctcaatcagtcataattctgctattgatgctactgacagatcaaccatcacttctaacaagtctacttcaatcagtcatggttctgctatggatgctactgacagatcaaccatcacttctaaaaaatctacttcaatcagtcatagttctggtatgaatactactgacagatcaaccatcacttctaaaaaatctacttcaatcagtcatagttctgctatgaatactactgacagatcaaccatcacttctacctctagcaacagtcatggttctactatggatgctactgacagatcaaccatcacttctaaaaaatctacttcaatcagtcatagttctgctatgaatactactcacagatcaaccatcacttctaaaaaatctacttcaatcagtcatggttctactatgaatactactgacagatcaaccatcatttctaacaagtctacttcaatcagtcatggttctgctatggatgctactgacagatcaaccatcacttctaaaaaatctacttcaatcagtcatagttctgctatgaatactactcacagatcaaccatcacttctaacaagtctacttcaatcagtcatggttctgctatggatgctactgacagatcaaccatcacttctaaaaaatctacttcaatcagtcatagttctgctatgaatactactgacagatcaaccatcacttctacctctagcaacagtcatggttctactatggatgctactgacagatcaaccatcacttctaaaaaatctacttcaatcagtcatagttctgctatgaatactactcacagatcaaccatcacttctaaaaaatctacttcaatcagtcatggttctactatgaatactactgacagatcaaccatcatttctaacaagtctacttcaatcagtcatggttctgctatggatgctactgacagatcaaccatcacttctaaaaaatctacttcaatcagtcatagttctgctatgaatactactcacagatcaaccatcacttctaacaagtctacttcaatcagtcatggttctgctatggatgctactgacagatcaaccatcacttctaaaaaatctacttcaatcagtcatagttctgctatgaatactactgacagatcaaccatcacttctacctctagcaacagtcatggttctactatggatgctactgacagatcaaccatcacttctaaaaaatctacttcaatcagtcatagttctgctatgaatactactcacagatcaaccatcacttctaaaaaatctacttcaatcagtcatggttctactatgaatactactgacagatcaaccatcatttctaacaagtctacttcaatcagtcatggttctgctatggatgctactgacagatcaaccatcacttctaaaaaatctacttcaatcagtcatagttctgctatgaatactactcacagatcaaccatcacttctaacaagtctacttcaatcagtcatggttctgctatggatgctactgacagatcaaccatcacttctaaaaaatctacttcaatcagtcatagttctgctatgaatactactcacagatcaaccatcacttctaaaaaatctacttcaatcagtcatagttctgctatgaatactactgacagatcaaccatcacttctacctctagcaacagtcatggttctactatgaatactactcacagatcaaccatcacttctacctctagcaacagtcatggttctactatgaatactactgacagatcaaccatcacttctaaaaaatctacttcaatcagtcatagttctgctatgaatactactcacagatcaaccatcacttctaaaaaatctacttcaatcagtcatagttctgctatgaatactactcacagatcaaccatcacttctaaaaaatctacttcaatcagtcatggttctgctatgaatactactcacagatcaaccatcacttctacctctagcaacagtcatggttctactatgaatactactgacagatcaaccatcatttctaagaaatctacttcaatcagtcatggttctgctatggatgctactgacagatcaaccatcatttctaacaagtctacttcaatcagtcatggttctgctatggatgctactgacagatcaaccatcatttctaacaagtctacttcaatcagtcatggttctgctatggatgctactgacagatcaaccatcatttctaacaagtctacttcaatcagtcatggttctgctattgatgctactcacagatcaagtgccacttctaacaaatctacctcaaacagtcatagttctactatggatgctactaacagatcaactaccacttctaaaagatctatctctagcaacaatcatagttctgttgttgatgctactgacagatcagctactactgcaacaacatctaccccaagcagcagtcgtggttctgctattgatgctactgaaagatcagccaccatttctaaaaaatctacctcgagtaacagtcatagttctactatgaatactactgacagatccacttctaacaaatctacctcaatcaatcatagttctactatgaatactactgacagatccacttctaaaaaatctacctcaataaatcatgcttctgctatgaatactactaacagatcaaccaccacttctaacaaatctgcctcaaacagtcatggttctagtatcaatgctactgacagatcaatcatcacttctaagaaatccacttcaaagagtcatagttctactatggatgctactaacagatcaacctccacttctaaaagatctatctctagcaacaatcatagttctgttgttgatgctactgacagatcagctactactgcaacaacatctaccccaagcagcagtcgtggttctgctattgatgctactgaaagatcaaccaccacagcaacaacatctactgattatactaaatatgcgttgactccagaagaacaggctgctgttgttctcgcacacaataagttgagagctttgcatgttgatactggtaatttgacctggtctaatactttagctgtatatgctgagaagtatgctgccgtttatgattgttcttctggtagacttgtgcactctcatggtccatacggtgaaaaccttgccctgggatttcctaatgcagtcgctgctgtggacgcctggtatagtgaaattgctcattataattacagccatcctggcttttccatggcaactggacattttacacaggttgtttggagatccaccaaggaggttggttgtgctgtaaaatattgtggcacctattaccgtgattatgttgtttgtgagtacgcacctcctggtaattatgaaggtgaattccctgaaaatgtcatgcctttgaaagcatctgtttcaagtagtacttccagtaaacctaagtcatcctctaccccttctgctacttcgaagaaatctatctcaagcaacagtaatggttctggtattgatgctactggcagatcaactaccacttctaaaaaatctacctcaatcagtcatggttctggtattgatgctactgatagatcaacctccacttctaaaaactctgcctcaatcagtcatagttctgctatggatgctactgatagatcaactgccacttctaacaaatctacctcaaacagtcgtggttctgttattgatgctactcacagatcaaccatcacttctaagaaatctgcctcaaacagtcatagttctactatggatgctactaacagatcaaccatcacttctaaaaaatctacttcaaacattcatggttctactatggatgctactaacagatcaaccatcacttctaacaaatctacttcaatcagtcatagttctgctatggatgctactgacagatcaactaccacttctaagaaatctacttcaagcaagagtaatggttctactatggatgctactaacagctcaaccatcacttttaagaaatctacttcaatcagtcatagttctgctgtggatgctactgacagatcagctactactgcaacaacatctaccccaagcagcagtcgtggttctgctattgatgctactgacagatcaaccatcacttctaacaaatctacttcaatcagtcatagttctgctgttgatgctactagcagatcaactaccacttctaagaaatctacttcaagcaagagtaatggttctactatggatgctactaacagctcaaccatcacttttaagaaatctacttcaatcagtcatagttctgctatggatgctactgacagatcagctactactgcaacaacatctaccccaagcagcagtcgtggttctgctattgatgctactgacagatcaaccatcacttctagcaaatctacttcaatcagtcatagttctgctattgatgctactaacagttcaaccatcacttctaaaaaatctacttcaagcaagagtaatggttctactatggatgctactaacagctcaaccatcacttttaagaaatctacttcaatcagtcatagttctgctatggatgctactgacagatcagctactactgcaacaacatctaccctaagcaacagtaatggttctactattagtgccaatggtaatgcacatgctgctggtgaagctgcatctgctaaaacaaatgttgctcactccgtgacaaccactactgttaagagcacacacatggtagatgttactgaatgtccaatttgctcactatccaccgctacctcttcgttttcttcccaaaacggtcaaactgccctacatggcgaaccagtattgagagttagcacagtttatactacagatggtgttgttatcactacatacactacttcatgtccagacagtgctaagacaggttctgtttcagcttctgctgctactgctcctgcaccttcagacgtaagcatggaatctgcccattccaatgttgttccatctgtaggtgttgctacttcttcttctaattctgcggaaagtgttacagttgcaaaatatgaaggtttggcagctagtttaacctcagatgttctattcagcgctattttaatggctcttattcatttgatctaattatgataccgttttagagaggcatttgaacttgtactaataattggcagacgctgtaatatatcatttattgtgattgtctgatgttagtataaaaaaattacagcacctgttgattattagtacaagtacaaatgcctctcttttttatactaacctcggttttatttatttactttttgtataaaatattttttttaaatataatttatttacagaacacttttagttggtctaatttatttttacttaaaaatattgaatcttgtcctactactacgagcatggccttagtagtttacttcattctcatcatcatgatgccttcttttctttacctaaaaagcatgacaacaggggttgtataagttattgaccttcttaaatacaactttatgcgtctcaaggacgatatttttttcatttcagttgtgaagaatacgtcactatctatatggaatccttcaatgctatcgtacacaccaaatatctgaagaccctactgaaatatatcaatgatcatatcagatcttctaaagagacaatataagagaactaagctgaatgggagcaaagtaaaaggaatatcgaaagacctagagactgtcaaccttgtggaactacctgagcaggtagacctcgatactgttcaaacaagtaaaccaaaatatattcctgttggtgttaatgtatccaacgtctcggtgaagacatttctaatgaggaaaccaccaaagtttgataggcaaactaaaacagaaataaaatcttcaaaaacaagtcgatataaaaaagatgtagtacccttagatgatttagaaaatacagctgatgaaggagatcacctgaaaatccaagaagtaatagatttggagaacgaacattttgaaaaattgattaatccaaaaaagttaattcaaccaatatctaacataaagaagaccaacttaaaggaactattagtgaatatgagaaacaataatcttaatactactacaaatacatatgatgacgaatatattacaaagtccttcaggagatacaacagtgtttccaaattagatcatttactaccacttttgtcccatactctgttgactgaaccatttgaatcttttaataatatcacttccaataataatgatattgaactaaaacagttgcacaaaaagaattcaagtgttatttcgtaccaaatgtcattatatatacttgaaatgtttacatctaattatatcttaaaacttaataaaatatacaaaataatagaaatataatatacacccattagtttttaatatttcactttgtattatcttttccaaaaactatgtcattaaatattattcatttgtaagtattaatagtattatgtgaagaatttagatgttgtaatgtataaattatttaaacgcattaataaaggttggatttcatatttatttaatggtgaactaataaattttagaattctatttattatgatatagcaataaatattctagatatatataatattataaccataggtaagaaaagtctatctgttattttatttgtaaaataatatccactagcttttgccttattttctttttatttaattattagtatacttatcaaaactgttgaataataggcagataatcactacttttttatttaaaagtgatttttgtagatcattaaaacaactttttgaagaaaatatttcaagaaaaagaaatagtgaaggatcaatgtgtgtttgtttataaacaccatatatattttctgcatagtttttaataaaatggagatccaatttgtctaaggctcaagtaatagaaatgttagatataaaattcattattgtctaagataaaccaactatcttcaatactactgtgctaatcatcaattctatcatatgtgttaaaatataactccacataagttattgtctctatggaacctgatttaagtttaacttgctaaagttagcatcaatacaacactgccaatctttatcatttatcaaaatatttcagttgcaatagatgctaaagcctagaaattatttgcattcacttatttggcatttttaactataataacgtagtcgaatttaagattgcataatttcatggtaaatagtagttttgttttcgaatcttgcaatttcctttttgacatttatgcaactggcacaaatatgttgttttagactacttttgtgcatgacatcttgcctgttgttgtttggaacaaacattgagaaattttcctttaaacgaccacataatagcaaaataaaaattggttgagggcaaaacagaaatatctcactcacatgaaactttctacttgctttcatcgtaaaatgggctaatagatgtttccaaacaagcagaggtaattataatactataaacgttttaattatgaattttaattgtgatttgacatcaagggggaatatgctatagctattgtttcaataattcatggtatttattgtttttgtttcaaatggattggaaaattctagtgaataccaagtttgtaatttctttgaaaactaatatggtgttgttgagaagaatagccagtcaatacgtaagctaaagttttttaagacgatccatagtagataaagccgtttatgttaaatgttttattttcacttcgaaagaaatgcattttttcattacttcagcgcaagaaaaacagtttttttttctgttgtttttgatcagaaaaatttggacattcatttttttaatcgtattaaatgttgatgttattgcatcaatgtttttatgtagtattaggaagtgaatcatttcttctagtttggaatgtatgcaatccgcaacctataagaagtagttgattcattattgtataaatatttattatagttaacagaaataatgcccaaaacatactcattatgatatatacaaaatcttttgacccataagaatttagtataacaagagattgtcgtatcctgtattatataaaaaaaatgaagttcatagaaatgaaattgtaagttcaaattgatttatcccaagcatatttctaattagtattcaattaatagggaaaattgatacagtcatttatgagattcttttatattattacagttgaatatcagatatctagagatctttaaaaaaacaaaaaacacttctaacagatataagtaaacatcttttatattatgttataaagcatattgtcctaagaacatattttaattcattgaagagcaaaagctctaattctaatgataataagaaaatgtttacataactacgaaaccatcaaaattttcatgctttataaatttgaggaggtattagaagtattgttttagaaacatagtgaaaagcaaaaattaattacggtacagtatcttggagagacatagtaacgacgttaatatcggtgagtatatttattcttttagaggcaaaaagaaaattaaaacaattcaagtgtatattgctattgttattttaggaatactaaaaagatttaatagatttataacaaatcacaaagctgaataatactcagataaatgtaagttagctatatcttgaattgaatttggtgcttttacgtataatagagatgttttaataattactagcgactaaggatatttatttattagagtccttttcaagttttaattgccaagtatactaaggttaatttacacttaacagagatataggacatcaatattccttaaatttggtaattttcaaaattcaaactaaaaatgttgttcctttcgtttaattgcttatttttaataacaaattttcatattgtagtatccaaattaccataaaatatttgtagttttatgttacaattgtaaaatttagtaagctatcatcttcaatatatggctcaaaagagattttatctttcaaatttattgttaaaaccactcttttgtccaagtgttaatttagcagtgaagactactcgctgtaacttgtgtttattctgtatttgaatgattattcatgtgtaatattagaaatctctgctactttattgataatatcgccccattagtataaaatttatcttgaaaaaagttttgttgtgttttttattgcatataatgcctaagtgtatcactgattatttgaagacaatatcatattaatataattaatgataatatttgaaaatctaaaaaatatgagatggtctatatttacacagatatatttgacatatttgttgtatgtttgattgagtttctttatattattcataatgattgtgttttctaaggattttgacaaatccagaagattttagaatgatttattgaaaagcagaagcatgactactattattacaacagtcccatataacctgttttgatctatatgaaagaaaatcgaagacaggtatcctcggaaaacgaagtgatttgtagtaattgttggatgtctgtttcaaaaatataataatagaaaacactctatcattaaaacagatttggctagcaggggtcttaacaaaagtaattaattgggaagttttctgagatatttatttatgtttatttggtgttttattatttaacccatgtgaaattcaagattaaaaggactaatgtctcttcaaaagaaaaatggctacctacaacaggattccagtaattgtgtaatttaaggattttacatgtcccattaaagattttgctttcttttacaagtcgaaaaattttttttctctgactgcagatatttttcgtgagatttagctcgaaagccgttgacaatagagtaaaaattattatgacaaaaacactacggctttatcccaaaaagggaaatgtccattaaaaaaagcttagattttgttttgtttttccgaattcagtggatagaatttcctcgagatcgcattgttattcaaagttgcaaatatttgaaaaaagaagaactgttaaaaggagtcctaatggaggaagatagactaggtacgtaagtcttcctccttgttgtagcgtgtaacaatcctgtttaaggctagatggtagagttaacattacagaaaaaactcatccagtctttcgatacttcagtgtgtaggatagacacttttatagagggtttccagtacattttatggaaagtataaaatagaaatgagaagtattatgattaaaaaataatatgttttaaaatataagaatttgcaggtagtagatgtttatagtatgctatgtgaagtattcttttgagtgtatctttaaaatgattttaaaagagaagtactctgaactatatattggttaaaactaatataaacaagtggattttgttttatttttattggacagttgtatagaaaaacaaaagaaaatataatatttttgttaggctgtagtatttttacccctgagatggttgtaggcagtagtgtataaggtggatgaagatggggtgacaatatcaacaacttctgaagacgaagaactgtcaccgtcaacaagtgtgatggtgtaggtggtgtcatattttaatcgattttttgacatagaagcaaatctagtctaacattactaaaattataagcaccagtctgaattaaagatttaaatcgtgtattatgaaaagttgtcttaatcttaagtctaactattgaagaaaagcaaaatgaacaatatttacaaagaataccgtactttttttaagaaatgtattaactgtttcgtgcattctattcttattgtcgtttttttgagtttttttaccaattttaacctggtgagtgtatgatggtcgttatactcttcaatttttagggtagaaaaattattgagtaaatcttaactagtattttagaagatgattcaagataatgtgataggtattactaaaaatcaaactgttggtattgttatgatataggctagtaaaaaaatatatatatagatgagaaaaattatttgtctcgaagatggaattttatattaggatcaagataagaaaacaaagtaataatttcacaaattctttttataggttgtaaataattatttcttataaatattgttcatgatactctcagtttttttctattatataagaaggtaaaaaaatatacttgcaatttatgtatgaagggttatactaattaatcatggttatgatttttagtaacatcttaagtgcagatgctaatgctagaatttttcactatcttaatttttgatttcttaatttgagttcttcacaatggttagttgtattaaatttcgtaagaagctctatttggaatactgaaatgcgcagtctacaggtaacaccctatattaaggggaaagacttggagtagccaaaactttgaagccaagtcgtaagtgtattcgaacaaatgattgtcaaattaacgttggcggcagattactgaaaatttcatttaagaaagctctgattgttgagagaatgtgccagaggtaattattagttttaaggttggtattctatcttctaaggtttgcccagaaaataaaataacttaagatcagtttaggtattcaagatcagccaaaaataatgaatttgctagtttagaattgaccattatgtgattcgtaaacgtttatggatataattaatatctatatttttgtatattatttataagaatctttacaaatttttgtctggacttttttaatgattttcaaaaaatttgtataagaatgaaattaataactatacttaaatattatatatgcaaaaaacaaacaaaaaaaggaaggaaaagaaaaaatcaaatatagaacgacatataaatattaagagatgatagattcttgtaaaaattgtacaaaatagccaccaactatatattaatattgcttcatagatgttgacgcaaggcttcggaatcaaaaattctagtagagttcattttagactaaagtaataggaaaatgtaacttacaataggatattggtgatattataagttttattgatatttatagttgaaagctagcaatactataaattgttattgtattgcttggttttttctttctacataactaatatacaagatacaatattatacagtatactccttttatcttcgaatcttctttaatataaatttttataacttacatggatgtattaatttttattgtagcaatgttagtggacattatttactttactcatatcccaatcatctgataattttgttactctttgttagacatagcaacataaatctcgaaatgaattacaaccttaaacattctggataataaataatataaacaaactctgaatatgtataataacccattaattattatgttgaggctaatttgctatttactctaaactgtgtgctatcttggatcttaactataatattaccaatatgaatataagtattagaacaagaacataactaacatgtttcaaactatctaatctgttataaatgatctaacaactcttccaataatgtatctataattatattctacattataaacatcacactagtagattattaattgtattaatttaacagaattagttgtaatactacaattcattatattaaaatgatctctttgattatcccaatactaatataacactatgacaatgagatagacaaagttaacaatctatatgaacaataattaaacccgctactattacttactgaatatatttttggtgttattaatattattaattattcatatctcaaccaagaaagctatcattatttagaatgcttttatactcttaatagaaatttatatattaatatgtttgtttgatcatcaggcaacatatccaaaattatcattacaactatcctaaataacatcttactatctaacaagtcaaacatttctggcttatgtaatacaccaactcaaacaggtctctatatactatacccctaactctttctcattctttatctttttcaatctcaataaattttaattgatcaaagaacatttcaactttcaatcatttcaatacatgcagatgtacaaataaaataacttgattgttaataaatcatgtggtaacagttgtttaatttccaacaggaatggtatctactggtattattataaaccttcataaaaatttaatatgtctccaaatttatttttctttatttaatgacatcatcattgtaaattgcaatattctaacagcagatgattttgcactaccactaattgacttaagaaagtattgatgttgtacaattcattagagaactaaaccaaatatgactagaggataattcacgtaactgtattggatatcattcagtatatgttcaaaagccagagagtgaaatcatataaaagcacaataaaaaactttacacctgatctgcatataactcatagcattaatacactatatgacattaatttttatccacaaaagatggccataacaaaagaaacactagacatttgttgaaagctgctggttcatagaaaaaaacttcctgtttcattgtattaaatatctcataacatcttgtaaattgattactcaagctaaactaaggttctttgtttgaataagttagataacactgtataaagtaggaaaaatcaacttatcatttgatagtaatactcaaaacgaacactattccacttttccaattgtatataaatatggtaactcagataaaataattcctacagatcagtaaaaaacctactttttgttgtgtatctcgcacttaaaccatttttgtttttaattacaatatatttacaagttcatacatgtgtattatttgatttaatactgttgattgttggatattatgttggtgttgtgagaattgacaacagtgttatggaattttaccacttgacagtcagtaataatgaattgattttcaggaagaaatataatcttagttattggtagggtgtatttttgtgagtgatttggatgtaatatttgtgatgtagttgggtagtagtacgatggtagttggcatagtgttgataattatactgtgaggttcatccatatgaatagatttcatggtagtagtattgaagtgatcactatgtgaaattgatatgtgctatcagattatatcattcaggtagaagatactataagtgtttgtgtttatgtatttgtaaatactcatagtaatagggtaatcataccataaagatagatgtattttatttataaatatcttccttagtaataatccatgtacaaagtggattgtcgtgaatatactctctatagttaaggatatcttggttgactatatcaaatatatttatggcataattatatcatgttggatggtagtatctcaatgttatataatgtgaatttgtgaagtgcatagatctcaactgaggatgtgttttcatctgtaagcaagtctttttaatgttgtttgcatggtgtagtgattgatatctgtttgagttgtttttatttgattgaaaaaagtttttggaatttaagaaaaattggatttcagaaaagaaaaagaatgaaaagataagaagacaattttagcatatgttggcagttacagttctacaaacagtgctgttttaaccaactagtaggtatagatcaagaaagtcatgtaagaatgaataagtggctattctatattgtttgctatggtgtgatataatgctcaataaaagatagtattgtgcaaagtgatagttgtagtaggtagtgtaatgttatggtagctattactgggatgtcagtaaaagtagatgtattaatggacatagcactttaaaatattaaatgtatgatagagagaagagaatatattgtgtaacttaataaattatacaaattactagaaatataagatatattcattatttctttggattttaccttgtactgttttgcttactaactgataataccatcacaaatcatatcattaagtactctctacctattaaacgtaaggaactgatatggaaaattgtacatgttgcaacagttcaaatacctattcatccaaaggacgtcttgcgccactctcttatgtatatatttacatgaaaccatctaggcagtgttgctattacctagctattgatttttgctatacttcgacatgtaaccattgtatacaccaaatttaatatcacaataactaattttcatgtccaaaatgtcataacaaaatttaatgagatctaacaaaaacgtaccaggcatgcccaacatcattagggttttgaagtaacatcagcaaattactcaaagatatcttatatttgagaaacgcatgtatgtagataaaaagatatagcgtatataaggaaaaatgtacatatcaatgtttaaataatcagtctaattagaaaaccttcaactactaacatcacattttgtccaatgaaatgtagaaaggggtgcatctgtgtagtatactctaaatgataattatcaatcttctgtgctaccatcttgttcataagtatacaatttgtagtaatcagctacccaactgccagttatatcattttttgcaatttgatctatttggttagctagttcttcactagcatatatcccttcccacttataatggtttgcacaataatcaacaccataatagccactgcacaaaggatataaagagtattcttttttttgtaaagtactgttagtattgcccattgaatactcagacataagtaatgagccacaattagcatttttttgtacatggtttagaattacccatgcatttgtggtttcatcaaaatatcttacttgattaacaggagaagcgccccgctctaaaaggatctttcctgtaatactactataaggaaaaatagcagcccaggaagaaatagaaatggaaagaggactgccattagtaaaagactgtgttgaattgatgttgctaagaaaacttgctccacatccctcttagtctatagatcttttatgctgtccatcaatcataacaccgttaactgctccaggtgtataccagcctactgttaacgtcgcagcattcataaaaacagatgtaatggcatttacagtatctgtagtgtaatcaccgcccagtggatccttatggtttatcttacaactagtggaagtattcttaattgctataacagaatccaaaactctaccatcctcggcaacgaacgcagcccaccaagctacttttacataaaccagcaattatctgttaaaatatgcatatattccctggacattcaacatattactactgtatcatagaaaggcacgcttttctaaaatttcttcatttctagctgcaacactatatacaaaggttagaaaagagattaataaaagaatacctaataatttcatgattgtcacctgttccctatacagttactacaagaacatcctaacaacaaaaatatttttatagtaatatctttaaccttgagagaaaattatgacgtgatgatgaactagtcttctggagggccataaatggtacactacttaggaaaattttcgaaaatcagatctaggaaatacaaaatggctcttcctatatatatgtataatacatatatgtgaatatttcattcttaaaatttaatcattttgtttgcaaaataactttgttctctagaggaacaaatggttgaactcactttcaactgacgttgaaaatttttgataaaataaatgaaactttcactgaagtagaagactctacattatcaaggatgacctaataagattttaactgagtttgaatgaacaatgctatttatcaagtcgacttactgtatgatattatgtacctatttctacacattgtatgattaattctcaaaatcaataggtattttctgtatttaaaaaaagagccccataaaatacatgcaaataggacacggatggttatattgtttattttatgccttctacttaattttattgtattcactatatataggttagtatcttaaatataattattaaataataccgaaaaatttcatattaattttgtatgtaagtaataccacatattatactaacattaacaatatagatgcaagtttctcttaaaaagtgtgacttctactaatccttttttccagaaggaggattaaatcgcatatgtgtcacaaagctttgggataagagcgccccaccctgcatgcaaaatatgaattatgttgtgtaacacaatcttgttaattcgagtggtatccagtaaaccttttaaatttcgaccgtttcaatgtcaagttacccttttttattattgagagatttatatgtgattaaatctcgagcattttcaaaaacgataagaaaaatcctgctatgctgaaaatgtttgagttttccttttattcttatatatttacttaaataagatgattacccttgacatatccctcaatgatcaaaggtctcttgacaagatctgatataattatcactccctgaaaattttccaatcagatttaataccttaaattaaccactgttcacatggctgtatcaatcctccattcagacactcagatgttacccaagggattgcgtatctaccgcatttctagttaggttctttacatatttccttattgatcctatacataaaccaagtttaatattacagaatattacgacgtagaaaataaggtaaaacaatatgataaaagttcttaaatttaagagtatgtctttcaaaatccaattacgtctttacatcagttgcttaataagatactgtattcattaaaactgacagaattggaaatgtaactttgagataattactttgataattttatagcaataaacgtctttattctaattatttctgttatcatctgtcatctcagtataaatgtcaacttaacttttgataactctagtatttgagaagaatatataataaagtcacaatatataaacataacacttgttgttatcaagttcggtacaggctgtatataaaaatattcttttaaatatgacttaatttacttagagtttttaaataaagagtaacacaatattcaaaaaatgacaaaatcctggaatatatggtcaagtgtaaaactacaaaggtaaaaagagataccataaattaagcagtacctagttaaaaaaccacaagaactctaagtgatttttctataaatttacatatagagtaacacctaagctaggtatttactcactaatagtgtgtttttgtcagtaaaaaaactcttataattaatcggttgttttgtggctgggagattactcacagattttatattgttatgttaaaggaaacctcaataaacaactaatagaaggattattcactcttcattggatatctcaacgttttaaaaacagtacttctccagatattacataagtcatacattaattagtttaattaaagcaagaaaggtatgctggtacaaaaatacatccttaagcaaccttgaaaatctaagttttgcaatttcataaattgtcctaccttagtatcttgatattgttaccgatcatctattaaatttcatgaattccatataaatgtattctgaaaaaatttcgcaataataatatcgaagttcctaaaggtgatctaaaaatttacagccacagcttttttattaccattattaaaaattgatacaacaacagctagcaatgttttgagatgagttgaagtaacagtaaaacattgtatcgttgtggtgatatttttgggtataacatgttgattttcttaaataattactattccatggtaattccttttcgcaactacaagaatatgacttatcatctgaaaagtaatataatcttctgtaacatcattttcaatttttattcactgtaactgttttacaacttgatatatagttagacttattgtttcttccactgacatatattactaaagagaaacaaccagatcataaaatgaaaaaaatacaagcacaatagaccaaagcataggaaccctcgctcaatatgatgcaaaaattcatcactgttacttatgaaaatgataacaattggataatagaaagcaactatcttccatgggttaatctacagaacaatcttctttatatatgcatctttactaaacagagtaatactaataaatctaataagaaatccagtacttagagcaatatctaagaaaatgccaacagagtttgcaatttccttttataaattggcatctaagtcatagattggactggtgatgaaatttataaaaagaatcacctatgtagtatataatatcatttggaaaatagtgtttataaggaatatttccacacataacataagatcatcacctataatcatatcacaagtgatcaccataataatacatctagctatatcgattgtaataacctctttttaatatttatgttctttaaatcataccaagtaagcaggtctaagccttaaaaatgaacacacaatcaaattcaatagtaatgactacaataattgtttccaaatttcacgtcttgttatacagctaggcaataattcccatttcgtacaacacagaggtaatagtatcataataagcatgccaataatcaagaggatagacacagttataatatctttttgttaaagatgttgcttatatttagaatataatcaaaaaagatcaaccaaataatagtggaaagtatagcagtaaatggtaacaatttatctatccatgaaggttatcgtaaagttatacactataatcgataagtatatttaaaacttgctaatactaaatatgatagcatgctgactaggttacttaaatttgcaaagactcttgcacgattttatccttatgttctatacagacatatatctgtttcaaagaaatgatgttaaatgatgtcaaacgatatcaagtacactgatattcacctgttatatacatttgaaagctactagtaatcgactaatattaaatgtaagttatcatgtgcctcatagattcgaaccaataagtagagtttcactgtataaaatctcctttttggttcttcgatgggtttctttattattttctttttatacagagatcagaaatcttttgcaatttccaataggtgacaaaaaaaaaatagaataacgaaaaaaaaaaaaaattggcaatgaataaatcgatggttgttttataaaaggttaaagtctatatccattattatagaaatagacatcacccacagaatagtttctagaatatgaaaagataactgcttgctcataattaattccaaatttgtttttacattaatttgtgactctatctattttttattcatattgatttattttccaaaaagaataaagacaaattagataatcacagctcagctcgacaaattcaatttatatctatttatttctaaaatataattgcatatttatatatttattttatattataagaaccaaatgacagtaaagagtaaagacgataagatcagggatttctgtaaactgcaacatgcatgtcaacagtttttagaatcattaaaaataatttatgatttaggtgtcacccatgaagaattggaagacatggttaacggtgaagacgcagtagaccaagctcttgcggttagcccgtgtatgtctattgcaagctatttaaagttattgaaagattcagttaacctaatggaaatctatgattattatgaatttgatccaaatgagactccagttgatgaattcatcactatggagcatattttaccattggatagttcttctaatcgaatatcaaataataacaatatcattactgaagatatggatcgtttaaagattgatacaaatgatgtcgggggaagtacaaaaaatatgactgagtcacaaatttccaatacaaagaagagtaatgatagaaatgaaaattcctccaataatcctcctcaaccaacaaaaaagattagcaaatcagatttaagtttgtctgctaatagtaataatgccaacagtaaaaataataataagcaatcatctaataaatctactaaaaaggagaacaataacaataaaaacaatcagttatttaataaagttaataacaatgataacaaaaaaaacaataagaagaagaacccaaataataacttttatactcctcaattaaatgacaggaccagaagattagatccaagtttggatgataattctaatccatcgagtttaagttcttataaacgatctggaagtgccagtaataacaatagttataagaataataataattcaagtaggaaattttctaagagtgaaaaagctgaagatattaacactgaaatctcacttaaattagatgcagcactaggtaaatataaattagcaccggaatatacaactaggcaattaaaaaatggttcatttgagaccacttgtagaatcaaaggtttgaacaccattgttagtaaaggttacggtagggatagaacgactgctcaacataatgcagcaaacatggcttttacaagtcaaaccttactcgacatattatcttcaaaagtataagtccttcttttttcttatgctttcaacagacttcgattatattcctcacgatagcaatatttatgttttaaatgatatgatcaactgtaatagaatagaaaaaattacaaaataggtgataccatgagagttttatatagaatatatcagttagtaatcttacgtaaatttctccagctttcttctattgcctttactgcctaaaattagattactactgtctaaacattgtatatctatataagtctgtaacataatatgtaacagtacatcattggaaaagattatgatataatttacacttaatatatattatcatagtaactgaacaactaaataaactaaaaaacaaaaaaaaacatgtaaaattaataaaatataatcatagagtttcaactttaacatgatcaccattttttgaagatgattccaagaaagcagaaacacatgctaaatgatgaaaagccactcttggtgtactcttaaccaaagttttatctttctttgctacagcttcatggaagttcaagaattcggtgttaacaccaaaggattcatcaaatggaactgcataaacctcttcttcactggcagtttcagcaaagctaccaagcctaactttaacgactggtttactcttattagaaacatcaacgacaatagatccattgataccatagatctttaagaagacagatttttcagtggcaccaaatgcagagccataagtgaaagtaccaatgacgtcactatctcttatcttaaccgtggcgaaaacaatatcatcagtacccgattctttacgaacttgtttagtcaaagctgagacagattcgaattcgccgactaaggaagtggcaagagctaattgatggacaccaccatcagataaaaatccaccaatatgttctgggttttgtctccaagaggtcgtcaaatatttgttgttactaataaatggaccagtggaattgtgagtaaaagagataatcggaccgattctttctagatgtttctttgcaacttcaatagagtttagatatagccaattttcaccgatagcaattggtaaatcagtagtttctgctaattggaccaattctttagcttgctgcatagtagcagctattggtttttctaagatgatcggcttgttagcagcaatggctttcttaacagtgtcaacattgaactgaacaggcaacaaggcgtcaatgtaatcaatatctttatcgttcataatttcttcgatggtatcataaattttttcttctggaataccagcaagtttagcaaactcgatagctttacttttagttctattgaaagcagctaccactttgaaatcttcaggatattcttggtaggatagcaaatgtctatctctagcaaaaatacctgtaccgacaacaccaactttcaaaacaggagacatgatattattattaataataacctttgttatatctgtaatcttttatttaaattatatatctatttgaaaataggtatacttagtgttcttgaaaagtattgtatgtacaagataactttaaatattacacattcaaatataatttcaaaaacagactcattatctgcacgacttccccttcttttcacatacacgttggattgcctgacacacactaactcttcactctgtctgttcttttcttcgagcataaaacagttgcctttgatctcaaacacacaaagcagaaaagggggaggggctcatgatatgaaagcacagggtaaaacacaatagggcaaaaaaaaaaataacaccaagttttccattattttggcaatgtataagcatttaatgtcgtcaatgagaaagggaagaggagatcactattatgttgacaacgattgtagtattataggattgatttatgcattaagtacaaaatgtagagttatatctatcttgtaaagtttataaacaagttaatgaagtatatatttagttgcaatgttattaattatttttctatgtatattattacatatccagttagagaaaaatttctactgatctgcttatctacttataataatatcttttgaaacattcaatcgaatagcaaaaataacttacaataccaatttatgaaactgatatttaccttatatagatacatatgtatatgcatacatacatgctgtttttagtaaataagctaagtaccataagtacgatgactccaaagataacaactcaagcctcacgtctaatcttacgattctagtagcaataacaattaataaactatcacatctgcttgcttattactttaagaaaaagaaaagagattgtatatcttattgagttactaactgtgacctccttcaatgctcttttctcagagtatatcaaaaaaggaacataacatttcccaatagaaattgttgttggaataccaatttagtaatatatatacaatctggcttttgcttggttattttatcagttctatagatacacaatttattatcaagcatgttaagttgaaatttatgaaaagatgaaatctgaaaaatgtgaatttctatacacagtagcatatttgaaaaaattacccatttataaaaatgaataaaaaataagcagctagaaagaggatacataacgttataatttggtttattttgccaataaatagtaaaaccttttttgtgagtacctttatccccccactgaaactagctaggtgatatctttgaagcaacatatttctttggcaacacacaaaaattgccaacggcttcatttacttcattattattaaattttataatgtcaagaaagttaaaaagaacaaacctattcacaaaagatttgaattcgctactatattcatatggtgatgtggcacagcctatgcaacagacttctcattgtctggatgaattagttacggcatacctggtagatatctgtaattcagctttaaaaacagcacaaaattcacaaagaaataaaattaaattagatgattttaaatttgcattgagaagggacccaattaaattggcaagggcagaggaattgatagcaaccaataagttgattattgaagcaaaaaaacaatttagtgagactgacaatcagactttgaaaaggtttagaaataatgaaaatgatgatgaggtagatgctgaggatgacaatgagaatgaaagtgatgaagaaagaggatctcacacaaaaaatatcaaaaacacatcaatatccaataaaattaaaggacataaataatttagaagagaaaaaaaaagatagaggtatatcagttcactagttgagtttgactaaatgcatatatttagtagcaagagcaattttttttctttaaacaaacttaaatattctttgacatcaacatctgcgcacaaatgtgttaaaatgatcacaggagcaataactttttaaatgttaaaatgttcatacatttaacaaaactatttgcatgtctatatatatatttttcatatatatttatacaatattattatattattaaatataggaggattaaataacgaatctgtcacagtactgatagtttttgtaattgtatttaatggaaatcaagatcataaacaattggattttcatcttcttcattgacataacctgcaaacccaataaatgaattccataatttagcagctctactaataaataatctccatagatttcttggtagatcaaaataacttctccatataaatctaatagcttgcatgtaattatgtaattccatatcccaagcttctttaatagtgtttctaaatccctttttatttgacattttgataccattttgaaatgtttctttagatttttttggtatctttaaatcaacaaattttggagacttagaattctttactttcgaagatgtctgttctctatcatttacattcctcttgtcgttacatgaatcattatcagtcgtggagacattgaaagtatcacatatggtctctttggcctttgaaagtagtttgaaaaaattattgttgaaaaatgatgcaacaccattattattcaatccattctcgcgctcatgatacatcttttcaaaattattaatagcctccacagatgtagataatctattaaaagtattgactaaggaaatcaattcgaattttgtcaatttattgacaatacgttgtcttgatgatttattagtttcatctagttcaaataaaatcttcaaactagtagcataaccagtagtttgtacttttccccataatttacatctatcacaatgaacacaatccattattttggttacatttttgaatctccttctgaaatcatctttcaaactatgatctacttcccctttaaacatgacgtcttcattaaagatcttactgtctaattgtgatacaatatttaatattttggatttaacatcattatcgtaatcattacaaaaatctaattctttcaaatatggtttaatcttccaaagtgctttagctacaattgcataattaaaataaatattggatactctatctggataattacccactctcatcataaataaatccaaattaggtccccattcaccagtctcggtgtttaaatgatcgttggaaagatgtgtaccgatagaggcatgtaacccagagacaattctataaaaagcatctttggccaagcatttttcagtctcattatctgaagaatcgaaacaattttctgcataaatacttttccatatctgaccagcttgttgaccaccataacctgtgaacctctctgggtttgcagttaaatcaactaagcctgcatcttcactagcaaaatcgtctatgtcgtaataatttatatcatactcatcactattttcttcactatttcttccaacctttggaagttgttcgttgtacttatccttttctttgttatcacataattgatctaaaaatgaagagtcctggtgatccttgggtatattatcatttaaagagttattattcaaagaaccaagaatttcaggctgccaatattctggtagactatcccaatcctcaaccatatcaatagcacaacttctactaaaacatataccatcgttattttcccatatagtgcatttcttgaatggatcaaatttaaaatacttgaagaagtcagtattgaccaaaccaacaagatcctttctaatattttggttaatagtgttaatttcagtaatcgtgacgtcacaatttggccccaaaacctggtttttatccattttacaaaacggtgtcaaatcatctagattctgttgaaatgtattgacttgtgaacgagtaatattagtcaaattagaaatggtagttgaatttgtatattcatcattacttgtagtggtatctagatattcttgagcaaccgccaccgagattaaactacctaactgaacaatattatccaacttcattctaccgatatatatctaggatatatatatatatttatgtgtgtgtgtgcgtatagaaagagtatactcagatatgtttatgtatttatgtgtggactaatatgtatttgtattgcgagcattaaaagagacgtttaaccgcccaggtaccacagaatatcaatcctatcactatatatactgtccccctaccaactggacttattcttccttccacctttttcttgaaagacgaaaaagtaacttttcttcggaaaagaacagcgcaaccaaaaagaaaaagaaaaatgaaaaaagaaaaaaaatcaaatttttggaaagaaaaagaagaaaaaagaaaaaggaaaaatgcgcattgctggaaatgaaccctggaattattgtctataaaaaaacacttctattgttgttcaatcatatagactcttgttttgtgtttattgagtaataacaacataaagttataattagtattgatgccagcgtgttacttttattaatttataaagagagttgaactttatgcttgtatttgaaacttcaaagaaattacgtaatcttctttctttttttacattttattattgtttttctagcgataaattgcaagcaatctttttaaattctcataacctatatagtatagttctcgtttgtacactgaaacagttttaagaatatggtgacaaattcttgttaaaatgcaaccagtgaaaatttcataaatagttaaaaaaaattgatattataaaatccaacgagtaatataacaaattcaattaaataaataaataaataaggatagaacttttttttcctctatctcacactctttaataaacatattcaattcgatctgcatatatttatctaattaaataatgataacaacgaatcaacgcattttcctatattatattttttagctacgcaaacatctttaattatttctttgtctaaatctgggaacattgatgtaagatgtttcaaagtttcctgtctttctttagtctccaatttttttattaatttggtaattgctcgttcttcttccattctttcttcttttgtacttatttgttttaatacaggtggcgacggtgtagagtctccattttcattctcggtattgctattttctgattgatttgaagtatatgaagatataaggtcactaaacattgtagccatcgatgttgttaaatcatctaatgatacagataaagactcttgattcttctgtaattcctgttgtttttctttttccttttttttttctttttccctctcctctttcaatttaaattgattttcattatataattgattaaattcagttaaattggatatgtttaatgattcagatgtcatcagttcaataaatttaattgcaccttgaagactactcaaataatataattcttctcctgtgttcaaatctgaataacggaacctgtttatgtacctaatattggatattaaatgctttacattactccttaatacaatatatatcaataatggaataaaattgtctgctccttgagtatcagaatctgctatgtgtttcaacaatccatataccactttacaacaatttaatatgcaaagtattttatctcttggtgacttaaatctatttattttgttcaattcatcacaacctaattctacaaatttattcaatttcatataggggattttatcgatctcaatatcattttccaaatgttggatttcaatgaatctgtattctttacatttattggtaaatttaatatcatcgatcaaatcttgtctatgttccttgtctatatcaatttttaaacttcttttcaacagaggtgaaaagcaatggtaatataattttcccataattaatttctccatcccctcttgtgcatttttaaatcccttggaatctaatgatttaaacggttcatatattttaaatttattaaatataaatatcttaaaatcattgatcaatttaacttgttccttgacggtccataatggtctttgtgtgcaaaaattatgtaaaaaggattttgtatatctaactattggatctgcttgttggtgtcttaactgttctataaacaatttgaaattaatatatgtatcattaatatccctagtttcattatctgtctcttcctctatgtttttatttgaattatgtgtaatgttgttggtataggagctttcttgtattatattagatacctttaatgaattctcgtgtatgtttttcttatttgttagagatgtgttattcttttgccttaacggatcaaattcttccaatacagtattatctggtcccatatttacttcggttccctcttctaatgaaaggtagagtttcatgtcttacttaataagtgaattaaaaaaaaaaaaaagatgctatgactagtttataatagtggttttctatatttcattagtgatggagtgaaataaaagtataccattaatggcatatatactcttcttcacaaccccacttttaaaaatctaaaaatttaaaattattcagatcagtgaaaaaaaaagtaaaagataagttttacttttatagtaggtgaatcaattcaaaactgtgaggtcaatatatattcggagaacacgaagataaataacattactctcaagtatataggtgtggatatgttaacctttgtcgcaaatatgataaatttttgaaaaatagggaaaaaaaataaatagatagaaaaagacttattgtgacttttatgcaaataatatatatgtaaatatatgatagtaggcagtgtatctaattcatatatttaaatattctatgtatttagcagcttgctcaaaactgaaggctactaatagagtaaaaccgttaaacatacatagtttggttatctctgttaaagcctgttcagatcgcatactattgtcatcaatcacaaataataggatattatcgttgttagaagataaaggacccattcgtcttgatatataatcagtgtataacttatgataacttaacgtcaggaatagaacagaacgacctttaattaaataatcatagaatatcttatgtgtgggtgtggatgatatatacctccaagtggtattttttaaatggtctaataatggattttccctctgtgtagtatttattaggacagtttttctcttaaacttcttattattatcgttggtattagtctcatatatagttttattatttttctgatctgctggtaaaggagttcgttgttggttgaaagtattgataacttttgtattactgttattatgattatcaatggttgactgttgttgttgttgttgttgttgtttttcttcaattggtgcattgttcagtgtgttttctttagctccagtttgttgatctcttaatcttttaacacctgcaagaatactcttaaatgatgttggatcagtattattcatctttatttaaattagaattaataggtccctggagaaaggaagaatgggaaggaataagagacaaaaggtgatagtaattaaatatagttaccgattgatattgtactgtatttctgaatgttttattaggttattttttatgcttattactgtattgctcatcctgtttaatatttgaaaagtgataacaagagagaagaaaaaacaactaacaagtaaattttatggatttaataacattgcaaatgcaattacatatagatatacaaatatgttcatacacaagtttgttaaacaaggcagcatgataatcagcagtaaatgatgaagccgtattttacatgaaaaagacacaaaaagaaataaagataagttgagaaatagtaaaacaacgtgtaaaccaaaaacgtgaaaaaagaacgtacatctgtactagctgtggcattaaataagatataggaaacaaaaaaagatattggtggtgctaaatgttgaacaaattgtttttaaatctattatcatccctccattaaaacacaaaatatgctctattatatatttatcaacgcaggacagtttcactattataactatatcaaataatctgtattctaacaaaaaaataccaaaaaatgaaaatttcagaaggaaaagggaaaaaaaataaatagaaaaaacacagaattttaataacgcttattttgaaagttgttaccttaatgttaccaattggtggtgttatgactgtacagcatatatttatatacatctatataccaacactaagacgtagaattaataaaaaaagaataaagaaataacgcagagtgagtctactaatctaaagaatgtctaatcaaaaaagtatgtatgaattaatggcatcattatgtatattgtgaaagaagtcaaacttttagatcatcaataaaagatgcaactagtttactaacgttagatgcattgaaactttccttcttcttattttatatttgttttatttttatttatgtttttgatatctagttgatctatcaaaattaagtattgaacaattacatgttgtcaaacaacagtttgatcaagaacttcaacatttccaacaatccttgcaagcattgatagttgccaagagtaaatttgtcgaatgtataaatgacataaaaacgatatcgcaagattcaaacgatgagcaagacattttaatacctgcatccccatccttatatattccaggtaagataagtaataaaaacaataaaaaatttatggttgatgtaggcacagggtattatgttgaaaagagcgatattgaagccattgaattctatgagaagaagatcaataaattgaataaggaatctatccatattcaggacattattaaagagaagtctcaatcatctatggcaattgctacacaaataagacaattggctatgaagcaagctcttgcttccaaagaagctgctaatgcttctaccacagcataatctagtagttaatcgtatatatatatatatatataatctgtatattattacaccaaatagtaaagaaatcagacaagttactaacgctgtcatacttacctacttaattatctctaagttattactactaatcatagtagttacgatatattttaaatagagaagtttcttttttctctctttttttaaaaaaaataaaaagaaactatatcttgaaagaaataagtaggaattgatatatgatggtgtatattggtgtgtagagtgttatatactaaagaagccaattagatatatcgaaaaattctacaagatgggtgcagatggtggtacaatcaacaaatctgatgttttaaaattacatgtagagagtgcgtctaatgaatataaagctaaagatgataacttagatgatttccagttagcctctagatggaaattttgcaaaatatctaatctaccattaaggttacccatagtgagtgactacatgggaaatctttataataaagagagtattttagaatggatattgtgtaaagataaagaggatcagtacgaaacacatttaagggaacagatagatcatatcaaaaaaattcatgatgtagtagaacttaataatttatgtgaggttacggacaaaaatgatccaaagataattaaaattaaatgtaaatttggtgatgacatatttggagataaaatgaaagtaccattagtgtatagtgttgaatgtggagatgtatttccagagaaaacgattaatatgaatattataaaaaagaaagatttgagttgtccagtatgcattaagagattaagttcagtagatgatatcatacccattaatccattatcacaaacagatatagcaagacttgaaaaaaggtataaagctttgtgcaatgataatctataccacgatagaacaaggaagaaaagtaagaagagagtacaaaaaactactatatcggataattcaagcaagcctcaaaaaaagataaaaatatgaggtattagtagatgaattttttgaatagaggcttataatatcctaatatagtaagaagtgatatttatctagaatataaattttgtttatttaagaaattgatacatatacatatgcgtatattttgtacaagtagggggggggggagaaaaaaaaaaggaataatgatgataataaatatatacagtcgattaatagtagatagtctggtatatgaaacgaaataatgaagagagaacagccatgtataagaatagggataatcaataaaataaataaacagacgaacaaacgtataaataaaaactcttttttgtctttttagcttttttatatcattattaaattagtttaaatcttagaagtaaaaaaaaaacaaaacaaaacaaaagttataatcattatttagcagaatcttcaatttttttttgttgctcttgttccataacttgtttttcatatcttttaccattcatataaagtgtatatattaacccaccagacatgtataatgtaccaccaactaaagttaaaacagtcagtctatgtaatgtatcagtaactcttgtgtaccatgcgtatctagccattatgatttgtatctaattttatatatccttaatttgatatatcccccttttttgttctatttagtttgattaaattaagtataataaagtgaacactttttattcttttcggtttcttattttgtttaaatatataaaatgagactcgaactaattactctcctgacaattttaagatattgtaatattacttttaaatcaggagttcatgtatgtacttgcatagatttaagagcaaaatcaatctttctaaattgttgaacttgctatctttttttttctttctttctttcttttttttttccaatgaaaggcgaatggaaaaaaataaggaaaaaataaacaaaatatcaaaaaccctaatagtgatcaataggaacaaagagtaaaaaaatataaacttgttggtccttatttgtgacaaactgtactatcatacaaacgttaaactatatgcagcatataaaaggaataaaactaataacgttattgaatttacatatatatatatatatatatataatttaagagaataaatttctaggtggtttttgtttacatgtattataaaataatgttggaatatgtctgaaaatgtaaaataaagaaaaaatataaagaggagggaggtaaacaaagacaaaaaaaaaattaaagactatccaacaaaaacaataacaacaacaatcataactatcctaaatataattttttccatcttgtaaaagttgtagctagttttttatatccttttttatagaaaggttcgttttttggaatgcctaagaaccactgggtgttttctttagctagttcaattaattcatctttggagtacatcttttcatctaatttgacaccgaactgtttaatatattctttcaagtcgtcagttgaccatgcatcaaggttttgcttcattgattgttgccaatcctttctttgttgattgaggatagccagattattcaacagattttcatatgtttctgattccatgaaatcgtttttgttctctacactccaatctttaacaccttgaacatctttattcaatgtatgcatggtctgctgccatttttttagcaattttttcaatggtttatttctattttccacggccaaattaatcagttcttgctttgtggcgaaatagggatattttatatctcttagatccaaaaattttttcaatctatcctttgaccaattatctatgcctaccaaaaatgtgtcattaatgatatcgctgctcttattttgacattttccatataaagattgaaaataatttttggagacattccaaagagaagaaacgtatgcaggagttttctttaagaaggggttactactacctattttttgctttgacacgcttagataccaattgatatcatccattagcaagtcgcggttcttgttggccaattggaccagatattcgcgcgaattgactaaattttcctgaactgggatctcatgagattgcagccatttctccaaatgctgggtgttccaggaatcaaacacatttggtttcaagttcccatttttgtcatagagttgtttgttgaacaattgcagaccagttaggagtctaattctttcatcttgtaaaagatcagacattttataaatgttctgtctgaccagattcaataacttgtctttgtcatccttgatgctttctctatcgtaggatactttaaatctgtccagccataggactaggtcgtttttggaccagttcttgaaatagtcctttgatggatagagaccagatttccccattttggtggagagagtgtgaaaattttttctaattagatttatcaacttgtcttttgagttgtggatatcgatatttttatcttctacaccatggatgtcaattccattagatttcaaaaactctattagagtatctgttgaccaggtaccgaataaccaatctgagacggaatttgagacggaattttcattggagaatgttgggaagtaattagtggcatgaaagttttgtttgttgctgccgttgccgccgcaactctgccagtaataatggtaacaatctgatactttggaccatagatcccaccattgtctttttttggtatccagacttttattgtattgattccaataagattgagcatctcttttcagctcatcaatagatttagaagtcaagtatttgaggttgtattgtgggtcattgttagtgtttaaagagacgggggagttgtccagcaggtaatcaaccaaatcgtctttagaccagtcattaaaattaaaaacactttgtttaccgaacaccaggggcgttgttgttgtggccaagattaaaattctagagaatttcattttcttacttgtttttgctgtttctttacctttgttctatatagagtttagtaataatttttatttctctttctctttctctttcttcctttctttccttttttttcctttttttcctttcactttgcacctgtattcttcagtatagagaatatatctaagtattactatatatatattcttgtttaatcaaagggcatattttatataccttgtgcaatcttttttagggacaaattcaaggatggatgacacaataagtatactttatgagacactgcataaaaaacaaaagaacaaacagcaatagaaaaagaatataggggagggaaaaaaagggaaaaggaacaaaaatgcgaagaacagcaaaatgacgtatacatctattgtcatacgccaacatcaaccacaatagcgcaacagcaacaacagcaataacattcagtttccccttctttggggtggcgaaaccaaaagttttgttttttcttctactttttgctctttccctccgtgtagtttaaagctaagggaggagcaggttgagagaagttgaaacgaaggaagccccagtggcgctgtttgcgataattgtccagcactcactgctgccgtctttcctttagattcttccagatcccttacatcgatggatgatatttatatatagatagatatttatgtaatcctctatacctgtggctgcttttacgtattaattgtattaatggtattaacgtattatgtgtgttttcttgacttcgtgttgttatattagacctgagaatctgagaatctgagaacattgatctgttcgtgcgtcatgatataacacacaacctggggggtcttttgtttttctggtgtatgggtgtttggtgtgctgtctagaaatttatttttttccttctttctttctttctttttatttttaattttttttttctttataatatattattgatacgttgtagaagaaatgtaagtactgtctttcttgttttaacctatttgtaaaggtcaactgatcatcttgtctactatttgataatctacttctttaattgtccttttttttcttttgtttttttttttttttttttttgcctgttttgtcttctttggcaggaaagatatatatatatatataggtatatatatatataatcgatagtggaataaggtagtacaatggaacacaaaattataatgtcaaccataaattcatccggtcaaactattaagagtgtgactaagacatcaacaaatgtatccaacaacaccacagacaaaatagataataaactggacaataaaacagataacgaaatagagcctactgtaccggataattcattccaattcatcgaaccaatacctataaaagtatccactacgacccctataaacaactatgaccaatataagaccagtgtccagtattccttagccaatctaagcatctttcaaaatatcccaagggaaactttgcgtggttgcgacgatttgacaagaatggaaagatccttgaattcaaacctcctaaatgaaatgaaatgggcattgaagaaatacttgacctacagcaataaggccccctacatgatctctttgaagaccttgcctcatctcgtcaactatttcaaaagattcatcatcaacttggtccccatcatcaacaacttcactgaaaaactccacacttcaacaaacaacctcgacgcagatcacttacaaatgggaatcaccagtcttttaatcttgagaaatctgtcccaagatatcgaatcggttcaagtcctgatcaaagactccgatttgaaacagtttcttctcttcgtcttaataacttataacaaaagcgaaaataacaaaaataatagttctgaccaatacatgtatcatacaaacataaaatattttaatgaaatcttacattattcaatggatctgatagaagcgatatccacctatattgctcctgccagcaaaaatgatccgttgtttgaaaatttggttctgatcctgaataaaactaaggatagggctctgatcatctctatccttagatctctttcaaggttgttggttcgttcgaaggaggatgaagaaagtgcagcagataatttggatgacaatactttgactctaatagtaaacaatctgttgatctccttggacgcagaattggtcattacttcatttgatttcctttatcagttctgtttacctggaaacaaaagaatccaatctttattaaacaacaagaaaagatttaaaatcttacaaagtgtcttacctgaatacctgacgtataatgttaaattaccaaactatcaacagatcgacaccacagaggtcaaattgattaaaagattaagaccgcctccaccaaagaagcctccaactttacctaaggatctgttccaggagttattgaaatttgacgaacagaaacggtctgcaacatggttgagatgctgttttgaaccagtgatgactgctgaatatacacagatccaattatggaaatcctatgagacaacattctcggagcctgttcgtaagcaagggggtaagattggtccagctgtagaatttatcaagaatgtatctaatgcattccctgatgctgcagcgatggtcattgtggacccaaccactgagactaaacgctttgttattaaaggtatccaaccaaggcataaagcgttatccatagaagaaggctataaattatcgaaatggacaaagacagatgttgaatctaaatttatcaaagaatctaaagctattgagaaaccaaaacaagctaatttgccgaaattaagttttcacactcaattatctgatgtaactaaggttacttgtacatttttatgcctgatatccaatgattcaaagggcaaaggcttagaattgtgccaagttattaaacccttagttatgcataaactagcaagtgttccagctttgaataccgaattagcagaatatatagataacacaccacagatataattaacgttaaaaatagatagaagaaaaaatagatagaagaaaaaataaaattttttagcgattacttatgtttataatagattatggcattgaccagctaattcaagtttgttttttgcaggaacaaatgaatgtaacaaaaaatataatagtatcaatagcatataaatagcatgtaaatatatatgtatgtatatatatattaaatttctctataaaataaacacgaaattcttattaaagaaagatggactgaaaacacactcaaaagaaagagaaaaggaaagaaaaaaaagatataaacaaataatgcatatatcatcttgaacaattcctattcgttattaaaaaacaaaaacttgatcatcacctgtagtttcttcgctcgttttccaacctaattctttagcatattttagcacggaagctttcataccatcaggaccacaaataaacaatctattgtccgatgagtattttggtaagtatttctccataatttctttagtgattaagccaacatcaccaacccaaacttctgcgtttcttgggtatctaacaacataatgaacagataaatatggatatttctcattaatttcatccaattcatcctttaataagatatcattttcggtgtcattacagtagataagagatactttagtcaaatcttcgggagtagtgatgatttcattcaagatttgcaaagctggtgttataccagaaccaccaacgataataccaatttcctttgacgagtttggttcgtagtttaaggtcccaaatggacccttaaattcaatgaattcaccaggtgtcaatgatgcaaaatgcttagaaagttgaccgtctttataagatttgacaataatgtctaaatggccttcatcatattttggattgattggattgtagtatctaactacttccttattatcgatgatacatctggctgcaacatgatggcctgctggaatgttcaaagattctagtttagtctttaaattgaaacgatagatggcagtgttctttgagatcaaagtttgatctaccaattctaatggagtccatttatctttgaataaagattgttttctgttaaaggacctaatccatttgaaggctaaataactcacaaacacaggtaaacttaataatattttataattcttggaaaaccatgttaatatgataataccgatgaaaaataatgcagttggaatataaattccatgtaaaggttcactcaaaatattatattcgtcatcatgatctgtattagtaggaatagtagaagatgacattgtttttcaaaagtattttttagctgttttatttgtctttctcacgtataaaataatagataattataaaagaattgttatgaagaggtgtatatactgcattttgatgttaaatgtatcttcttacacctacgtagagtgttagatctcatcgccaaatttaaaatgcaatttaattgatgaaacattttccgtctctgcaaagctagcaaacctaaaacagaaaatgtatataacacccatacatcaacgcacaatgtaaattatcatgtgtaaaggccagtgaagccttttgacttcgagcatgctactggtacagttgaagagattatatatatatacatacacctaccacaatgtttttactaaagacactaacttataaataatgtacagttttcttataagtatgtgacaaaaaaaatcttacataagaaaaagaaagaaacacagtaaatgcacatatatatatatatatatatatatacactaaagtatatagatattcaaagttaagctagaattactatgatatattcttgttaggattattattatggtggttggtgttgcctagtttaatttcttgtgatttggtattttgtaagagatagtgccattcttgtgccttgcttagttgactgtgtaaaaggtatcgataagtttgtaaaatataagtggagaatggaatgtaatatgatagacagatatcaaatataaaagaatttacaataatgagcccaataattatattattgtctctattttatttttaagatttttttctgttaattaattactatgtcatctcattatgtttaatattcttcctcatcagcaaaggaatcagtaccaacttcgatataatccctttccaatgcagctaaatcttctctggcttcagtgaattcaccttcttccataccttcaccaacataccagtgaacaaatgcacgtttgttatacattagatcgaatttttcatcaattcttttccaagcttcagcaattgcagtagtattagatagcatacagacagctcttgtaacatcagctaattcagaatttggagtcacacttggtggttcgtaacagataccaattttgaaacctgttggacaccagtcaaccatttgaacaaccttcttatttttgacttgtgtaacagcgctttgcacatctctagtgacaatatcacctctatatagtaagcagttagccatatatttacctgtagctgggttacatttgaccatttgattgcctggttcaaaacaagaattggtaatctcagctacagaattagattcatggttggccctattcttagagacaaatggtgcatatgagaccaatgggaagtgaattcttgggtatggaaccaaattagtttggaattcatttaaatcaacgtttaaagaaccatcgaatcttagtgaggcagtcacagaagatacgacttgagcaattaagttatttagatgcttgaaatttggtctagcaatacccaatctctttgtacacatatcataaatagcttcattgtccaacatgaacgtacagtcggaatgttctaaagtagaatgtgtagataaaacggtgttatatggttctacaacagatgtagaaacctgtggggcaggatagacagcaaattctaatttagattttttaccataattttctgctaattgttctagtaacaatgaaccaagacctgaaccggtaccaccacctaaagagtgggtaaaaagaaagccttgtaaaccatcacattggtcagccattcttctaattctgtcagtaacttcatcaataatttgggttcctacagtgtagtgaccacgagcataattattggcagcatcctctttaccattaattaattgttcagggtggaaaaaatctttgtatggtccattacgaacttcatcaataacgtttggttctaaatccacatagatggctcttggaacgtacttaccagctcctgtttcatagaaaaaggtggaaaaaccttcttccccaccctttggtctagttagaccatcttgtaaataaccgtccggtctaataccatgttccaaagagtataattcccagcaggcattaccaatttgacaaccagcttgaccaacattaatactaataacttctctcatatttaataacaactataattagatatatttagatatatgtatgattatagatttgcgtatgtgtatttgttattctatttatattagtaatagacccttaatataatattaattacaacctgcttatgttttagttgtctaagtatgtttctattaataataattaacgaaaatagaaagatcactaataactactctgatgaaagtgccagggcttgattcaaatagtaaacaatctttctttgtttactcgtctgttttaagaatatcttcttgttgttgtgttaagattttctctttctttttttttttagttttttttttttgggttggatttttctatttgtttatattttttttcgagttttgtctcacgtggtcgtgtgggtttccccaaaagggtaaggacagatccagggttggctgcctaatatggaaaaccctaaacaggacgtaaaggttgaaaggaaaggcaagtattactacaaggcaactatttatggactctaccatctagaagagagcttagtacttcaaatgtatctattaaaggtgagtagatctatttatttctaaattcctctgtctttacaacaaataaaatcagaaaatcataaagaaataacgaggtttataaagatcaaaacgtttcattatgtttatttaatgatatgtatatgtatattttaagtacatctatctgcattaagattaaacagttataattattaaaatgtagtgtaaaaatataagtgcatgtttataaattaaattttatagactgattcgacttcaaaaagggaatgcaattgagttagagaatgagcatttgtcagcattatattaactcatgttcttgtgtcttgttctggttcttccttttctcacctgtcaagaaagactttgcaaattgctattttctttcgatgaactatagcacgctatgatttgttaattctttttattttccttatacctcttcttcattgttagaagaagttgcagaaacagtagaataagttgcataatttattggattaatttcatcatgatatttttcactaatttcttccaaagtcattctcttagtttcaggaatgaaccaagtagtgacacaacctaataacatgaatagagcaaaaatttgcataacatgtggcaaccaacaattctttggttttccatcacgactacaattgtgatcaatcaaagtacctaatgcagtctgggcaataatggcaccaattttacctgctgcagcagagataccatgagctgtggatctatatcttgttgggaaggcttcacctggaacaataaaagtagtaacatttggaccgaaattgcagaaaaattgacataaaatgtaaagacccaatagaccattgtctccaagttgattgtaggcaaacccaataacacagaataaagcagttaggatgatgaaccccatcatttgaattggttttctgccaataatgtcgattgtgaacacggagaaccagtaaccaggtaaagaaccagcacagattaaaatcaaattacctgcagcagagttgtataacttccagtagacgttttctgaaccagcataaccaatagtctgtaagataacagcagagttcaatgaaatgccgtagaaggcaacatctagagtgaaccaggaaccagcagtacctaatagaatcttaccatatttccattgaccgaaatggtgacagaaatctttaaatgaggcttccttcttttctggtaacacttgttgtgtagtagtgacttgggatctgtcgcaagtgtgaacatcaacttcattcttttcatcgacactatcatctctatttgtggataattcgaattgcatatcaacgtctaaagcatatcttggagattcagggattgtcaatctaaaataaagacaagctaaaccagggattgcaccgaacccaacaaggattctccacatttggtcacaggccaatctacaagcaggaccacattcggcacctgtatttgcattaatcaattgacccttgtaggctacaataagaatcatagccacaacaccagcaaggatttgaccgaaagcttgattagcaaagacagaacccattattgcgcctctccatttcgtagtagcgaattcggaggatatgattgaagacaatggatagtcaccaccaataccgatacccatgactattctgtaaaaagtcaatactgcaacgaagttgaccccaggagattcacccaaagtacattgtagaattgtacagatgatcataagaattaattctagaccatatatttttttacgtcccaaaatatcagctagacagccaaaaccaacttgacctatgacagtacctacagaggttgatacttttaatagagtcgcagttgagtctggcatagatccttgccaaaaaacataagatagcattgccacaccaagattgatggcaaaaacatcatatgagtctgttaagaacccaacaccggctatagcgatagtacgtatttgttgccaaccaaatggagattcatcaattttttccaaagctaatcttcttctttctagtggatcttcgatgtcagcaaattcatttatataattgtggaaagcagcattaccaccagcagtgatatttgattgagtattgttttcttttctttgactatcgttatttgacatatttaaatttttcaattctttaataatgataatactaataatagaaaaaaagagggaatattgtcaattttgtttattattaattataatctagttatctataaaaaaaactacttgtgtaataataatagtagttatgttgttgttgttgcgatttagctgttgttattttcttgattcttcttgtttgttttgtttggtttactggctacgtggttacgaaagcagaaagaatgagagtagagagggatgatgttagaaaacaagcatttgggtttatatattaatggaaagttggatatagattagcttacaaactagttgctcctaaaccattcatgacccacatggcacataaacatgcacacatatttctatattttaatttattttattcacttcaactcaatttggtctgactttactccatctaaagtaatcattaattattataaaaaagaaatagatagtagagattgtaatacaaggaaacataacaatgagaaaaacctaatacagccacgtggaaaacatgttgatccaaaaaatgattaaataatatgaaagaatatattgattgctcatcaacttcaaaatttttgcaagaagaagccccacatggggaagaggaggatgggatatgttcatgaaagacaggggaaactcgagaagagaatgggcggttcccaaaaaggatgattaaacaaaaaaagaaaagaagagaaaagaaaaaaaaagaaggtattgaaaattggaaaattgaaaaaacattgaacctgtggtcaaaacacaatagaacggtattcttttctcctcttactcgtattgttctgcgggtgtgtgtgcaaatgacaatagaagaaactgtcaaagtgcctgtttagcaaaagaaaataaagaaaataaagaaaagaaaagaaaagaaagaaataataaagccggatataatcggccatgggggccaagaagaaaagaaaagaaaaaaaaagggaaaatgttttttccttctcactgtattttttctttctttaattttgtttgcttcttttttagttttgttgcagcactgaagttcacacgtgtgcaaacacccataccgcactttccatctaattattacaaattgaacaagaagtgtggagtaatcacaaagttggcgaaaattgcatggaggagtccccttctacaagaatggaggaggtgaccgttggtataaataatggtagtattccacgttttcaacgatccccacgttctcacattgccgggtagtaattctttttttctactatcttgactgggggcaggtttcctatgggcttctaatccctctctcacagtgagttgcacaatgaaaatatataaaaagaaaaaaaatagtaatgtttttctgactggaattataatggaagtagagctttataaatttgctcagttttttgttttttgtttctggcttttccaattaggtttttttttccttttttttctttttttgacaaattcctaattcatatcttatttttcttctcatttatgacgacagtcctttttttttttgtttcttttttttcttgttaatcattagaggaaattatcgtaaacggtaaaaattagatttagttacacaagtatttttactaaaagattaccgaaattaatagcaacaagagaaatcttatttgacaggagtgagataggtggaaacattaacagatacccatagtatttctaatattttatgtgaaagatatgtgattgatacgtactgtgaagtctattttaatacttttctttgtttgttcttaatgtagtgggggaattaacattacagtgtattatatcataccatatctgacttattctgctcttatattgttattgtttcttttgggttttactatagtaataagagaggatcgcacattactatactatctagcgggacatacacatagaccaaaacaactgttatctattaaaaccagtatatttattcttaggaagaaaaaaaaataaaaaataaaaaataaaaaataaaaaataaaaaaaaaaagataaacacataaataaataaaaaacagatagaaagaaaaatgagtaatttatctagttcaaataataggaagaagttgttattgatggggagatcaggatccggtaaatcatctatgagatctatcatattcagtaattatagtgcattcgatacccgtagattaggggccactattgatgtagaacattcacaccttagattcctgggtaacatgactctaaatttatgggattgtgggggtcaagatgtctttatggaaaactatttcacaaaacagaaagatcatatatttcaaatggttcaagtgcttattcatgtcttcgatgttgaatcacaagaagttatgaaagatatcgaaatcttcatgagatctttgaaacaattgaaaaaatattcacccaactcgaagatcttcgtcctattacataagatggacttagtacaattggacaaaagaaacgaattatttgaaattatgatgaataagttgacggaaactgccaaacagtatgggttccccaatattgtcggttttgccacctctatttgggatgaaagtttgtataaagcttggtcgcaaatcgtctgttctttaataccaaatatgtcgatatatcaatcgaatttgattaaatttaaaaatctcttggacgcatacgaaattattctttttgaaaagacgactttcctagtgatttgttccagtaataacaaaaccggtggtgataacggtgataatgataatcagtcaaatgttaaagaactcggttcaataaagattgatccaaaaaggtttgagaagatttcaaatataatgaagaattataaacaaagttgtacaaaattgaaaagtgggtttaagacattaatattaaatgattctatctatgtaagtgaaatctcttcaaatatggtttgtttcattgtattaaataattcaaaacaaccacgacaactgatattagaaaatattaaaaaggcaaaagaattctttcaatagtcagtctataaaaaaaagtgaatgaatatattataggtatatgtgtgtgtatgtatgtaatttataaaagtataaatctgagatataaaaatatatgttttttaatgatattttcaaagttcacaaggtgtagatgttagtacagaaatacaagatatattaatatatgtatttattatgtcttttttattttttataatatgtacatgtgtgcatgtttttttgtatgtgtatttgtattttttacgttatgtacaaaagctgcggaataaataaataaataaataaataaataaataaataaaataaaaaaaaatatatatataggtagatgtacagaaataaaaataaatcgttaaaaaatcgttaataaaaatacatcaatttagcagatattagcattcgaatgttagtacaagtactgtcagtaaaattatcttattttcatttaattctactgctttatatttctttttctctttcttttcctttttttatattacaatcccttaaagaaatctctcttgaaaagggatagtttcaaccaatccataataactttaaatcttgttctggcagataataacatagataagtaaaccaatctccagatatagaatgtgaaaataccaccaccggtatacagagaagtcttgccataagtgatattggcgatggctctttcatgacccaagtatgcaagagcacctaaatgtctatatttgaatggtttgaagttattttcttcaaataacaaatccactttctcctttttcttacttaaagtttcgtggaatcctgggacatatgacatcttatcaaataatttagataaatattctgcttgttgatgtgctacttgagctgttggaggcaatccgatgaatgcgttgtcgccaatagcaaagatgttagaagtacctttaactgttaagaatggattaacagtaatagccctagtagaattagcttgctcagggatctttttagctaaattctggatgattggtctgatcttattacctgtagcccaaatcaaagtaccataaggtatactagtttcagtgaccgacccatctggattctttgtccttgcgatcaaatggtcagcttccactttaccgacagcagtattcaaatgtaattggattgaagtgtcttcgagaacactttgagcatatgatgataacttcttctcaaacatacttaaaacgattggcatcgcttccacaagatggatcttcacttcacgagccaaagatggtagatatttttttaattcttgagttacatagtcttgtaattcaccagcagtttccacaccagttggaccaccaccaacaacaacaatagtcagtaatctctttctctctggatcgccctctggcaagaaattagctttttgcaaattagatgctatagtgtttctaatttcgaaagaatgaggtagttcttttagaaagtgaccatattccttaacacctgggatgccgaatgtgtttggttctgcacctactgcacagatcaaataatcatatttaatctctacaggatcatttttcttgattcctacattttcctgtgggccagagtgtttcaagtttggtttaatcatggaagagactctgtctatggacacggtatttctgtctggattgatacctgtagcttcagcttggtaatagatgacattaccctttttttttcaaagcgaaattgaccactggttcaataatagatttttcatcaacagtacccactggtgtagagggcaaaagtggggtgaaaaggaagtagtctcttggcgagatgatggagacattatattttttggtgtcaattgtctttagaaaactaataccaccccaaccggaacctaagatgacaatatttggcttcttgccattttggtcatcgacgactttcaaagtttgaaaagaggatgggcccgcaccttttttatctacaggagtgaccctttcttcgatttctgtggtggacatggatacagaagaagaggaagaaagggaggaggtggacgatgaggaagaggataaagaacctagattagattttggagttgtaactgtggacgcatatctaataagagatgtagttttaacattttgtaacctatatctataacaattgggtaacattatgtgtagtgttgaacggtagggaaggagtgaagatttatcttaacgtgttattatatctataatcgctgttttttttttctttttctttttttctttttttcttttattatgttttcctttatgtggtctctgagtaatagattagatattgttactctattgatagctatgttaatactttacttgtttgttgtttggatattcaattatatacaaagaagaaggaaaaaagaaaagaaaaaaagaaaaagaaaaagaaaaagagaaagaaaaatggatatttcaatattttagatatattgtgaaatgtaagaatgtagcaagacaagggagggtagaatgaattgatgataacaactaaacagacgccttcgtctgaaaacaggtcagggcagttgatgaaactccagcgcacatagtacgcggagaacaccaccgtgtatggctgaaggagatgggaaaaaacaaagagttcttagcagtaaagaaatatttttatatatataaatgtagattgaaaagttctttgagggaggaaatagtacaaaagacagaaagaaagaagagaagaagaagaagaagaagaagaaggagaaggaggagaaggaggagggggggggagaagggagttgagaattatagtatggtatagtggtggtggtgttaatttatgaccgttacaaaaccaagagaatcgaacaaaaaatatcggagttctacgaatatcctggacaacgagtctaatccaatcaacgtctagaagaccgctagagtccttttttccatatatataaatttttttgctcttctcgtttttacttccagttcccagaaaaatccaaagcttttccaaaactttgtcccttggctttttgccctacgcttttttctttttttccacttattctccctgccaaaatttttccaagaactccgcgtttgttggttgatttttggaagaaataaatgaataaatgaacaaataaataagggaaaggcaagaggatgctcgagtgacagaaaaaaaaaagaaaaagaagacatttattaatggcgatggttaatggtataattatgagggaatgaggggatgtgctgggtttatcttgtttttttcatatgtaaaatcagggtaatagagattatttttaggttgtgtagtttctcgtttactttttttttttatctttttatcttttttcacatgtaaaaggagtccaaggtattttcttttcgaaaaggcatttgtcttttgaccaaggacatgtgttgtgatatgacatagtagtagttctggcagtatatatgtacatacagtcaagttaagatcctatggccgtgatgataacatatgaggtttggttaggtatgagaatgttatttgtataagtactcggacccagacatacaattttgtatgtatatatatatgtagtttaacgtaacaaattatacattgtagcgtcttttcttggagtttcatctttctcttttgatagacaaagtaaggagaataaaatgttattggttcagtaatatcctaataaggaaataatgtcaacaaaggcttatcgatacctcattaggtaataattatatttttaaaatttaaataaaaaaagaaaaaaaaaataataattttaactagacttatctacccgtagacaaaaaattgttagaagtattaatgtaaaaattgaatcgatgtgacacaaaaaagtataggatagtatatagaacactatacagttaccagtatcaccatcttataagctttatatatttctctcaacagtgaagttggttatcattgctgttgttattctttttttttttttattcgtcttcgttttttttaattaaaaagcatattcaagaaagaaaggaacaggagataaaaaaagataaaataataaataaataaataaataagagatagtcttcgaataatgtatagaagaactctgaataataaatcttcgattccaaatacacattactcattgcaacaagataatctaatacataatttcaatcaattgaattttaatgatcctcttcgtcaagatgagaatgtgtatgatgatgatgtttatctaggcacaagatataataacaacaactataacaatattgataatagaaacttattttacccaaataataatacatcgaatgttaataatgttggttttgaaaacattaattacattcactatatgtatccttatggaaacttaaataatcacaatgtaacagaaactattaataccccggcttataatctttatcaaatagattcacataataataataacattcatgatttaaatgtaaaatattattcaaaccataataaaaactattatgaccaaaatcaaaaatataataaaaaaaagtccagaaatgaaggaaaccaaaataatagatttattaacaacaacaacaataataatttgaaaagatgggattctcatagcacatctgatcttccctttactaccaagtatttaacttccagtgaaagatatttccacgatccaattgatattcaattgatgaaagaacaaaataataataaaccatttatatctgttcaattaaataccacatataataacagtaacaaatataataatcataaccataatcataatcataactatagcagtaattttaagtataagaaaaatagtaatcaaaaagataatacacaaaagaatgctctcttatattccaaagaacaattactcattcaagcaaaaaatagaaatcaggagaaattgaatcaattgtataatttaatatcaaaatcatacaacaataaacgaaaagatagccaaccattgttttatatggcaggcttggaaagtttacctatatattcatttgatgaattgatcacatataaagaggtcgatactatgctagagaatgttgatgaggaaaagatacaattatctgttgataagcatcagaatactggtattcaaactggtttggaacagtatttcaaaagatttataaaatgtaatattcaaccagtggatgacgttgttcgtgtattagattctacagctgctcttactattactcaaaatgtgtttgcttccattaataatactacttctaataatgatcatgacactgaggcagatgttaataatggtaatagcactcaaattaatgatgatgaagacgaaggcggtagcaacaatgaaagtgaaaatggaaataaaattaaaattaaaaacaaaaataatgaaagtaataattacaatcctaacaccaaaaaatctgttagaaatttggttcaaacaaaaacatctattttaccttttaataaacaatttcaacaatattcaaatgatagtttcgaattaagttttgatgggaaagctatggatagaagtgatatatttagaatggttgattcatttagtatcgtttttgataatgatagagattccaatacaagcaatcctaatataaataatccaaatggtagtaattctaatactcagccatttaatttgtccgaaaatatattaccagaagaaatgacaaataatttagtctattaactataaatccatatatataccacgttatttcaccaaaaagaaagaaaataaaaaataggaaaaaaaaaaagaaataaaaatattatcatcctctttttatccactatctaagaatataataacataaatatataatattgataatattactataaaatataataaaaaaatactcctatgactatatacatgatttgttaaattctacctcatttatcctaccttttttttattttttgttaagattacctgtcaaaatcgtaaagatggttattaattaattcacacattataaaatcttctttctacttcaaagcctggcttagatttacgtaaattcctttgttcttcctttgtcaacattgtttcactcaattctacattgactaactctttaactttcaaaattgaacctgcaatagctggcgtcacctttctgtacactgtagacccccttttgcctaatcctaaagtttttacaatagctctagttgtcttgggtgtccctatcaaagatctaactaatgtaattttatagtataccattagcaccgatttatatgtatttctatgtatatggatatgattgcaatatataaaatgtgtagaatggaaaactatgtccgcaaatatcacttctaggaaagtttaagcacacttaaatgagtcattaagtaatatcagcaggtagtaggttctattgagtagggtatatgatctaagaatgcaaaaacaatctcttctaccattatttctctcaaagtttcctctatctatttccatgtttttcattttctcgcagtatatagttcttccaaagaaaatcaaaaatttctttcctcgaatgtcctgacagatattttttaataacaaaaccttcaagaaaaatatctaatcaatcaacagaataaggattttaagttacaagtattttgaaagctagtctcatactacagtacaggattcaacaggcaatattgtggttacagggaatcgtaattaagaggaagtaagtttttggtctagtggtcctttaggccctaccataatttgatgttacgttcttatataagtataaaaagggctagctaatagtaggctttaaagatatatatatatgttgccaatagggatttttagtacttttttatgagtaatatgccttacagttgcttagttaaaggaaaacgttgagtcagagtggagtgaatggtcctgagatttcatatgtatataaatctggtcaattgcaaaagtgttatcgcatccttagtgatatgaattcttatcattatttcaagcttgatttttagtttttctcatttctgccaaccaaagaggacattatattttaatttcaaacatgttataaaatgatgtctttcataaataaattgatttagcttctattttgataaattatttttactaattaatttttattgagatgcatagaaatatcttcgtacaaaataacattaatatcttgatgctttaaatgcatttgttattttagcagaattatcaaagtgggaaagtgctcattcttgaatgacagatataataattcgaatacgttttaaacttatatcctaggtaatcgttgtttctttttcttgccgttttcctccccccatttttccttttggttaactttcaacatagcttactaagaacagacaaattacaagatagtttcttgtaaagatctatttaaaatgattaatgcatcagaaccaaaacatcagaaattaccaagagataaaattacaccagaatatattgctcaaattagagcattgaggagagaaagacatgaaagagaacaacgagaattggaattgaaacaaataagaacaaaatttttcattaaaagacctattctttatgttcccaacaaacaagagcagcggcaacaacaaaaagtagctcatgataatcaatttattaatataaaaattatgacatacaacactttagcacagacgttaattagaagaacaaccttccctgattcagacgacgctattaagtggcataataggtctaaggttttaatgagagaaattaaatactaccatagcgacatactttgtttacaagaagtagataaaatacaatgggaaaggttctgggctgaagctttagcggaagtggattataaaggtgagtttttcacatatccaggtaaagtccatggtgtggcaattgcatggaatacagaaatatttgatgaaaacccggttgatgtcatcccactgatcttagataaaattattgcaggtggtaatatacgtacttccactagaacaagaagtgtggcattaatagttgcactaaaatttaaacaaacccatacacaaccctctatctcagataaaccaaatggtattattgtagccacaacgcatttattttggcatctttttggcacttttgaaagaacaagacaatgttacattattttagaaaaattgcatcatattagacaaagattgattcattcaggattatgtaaatattggtacactttttggaccggtgattttaactcacaaccttgtgatccaccctatttatctattacagaaaaaccaataaaattaactggtagacctaaagcaattattgaatgtagtacatcttaccagtactcaaaaaggagaaacggtgaattatctaataagagtgactccagtgatagtgaaggtaataacgatgatgaagaagattccatacctgataatcaacctactgagcctagaccatacacttatgttgcgactccagaacagtctacattagttcaaaaattgcttgatttacataatagagtaccattaaaagctgtttctttgtacggtttaggatatcatttagtgcatcctgaaaattctaatccatctacaacaaatagcgaaccccaattgtcccatatatcgttaaaatgggaaggtttattagactatatttttcttgtgaaaccatgggatccaacaaatagtgaagagtcaagtaatcaagatataattgaaaatgttgagagagattgtcacctacatattaagggatatttaaagatgcctttagctgaggaaatgcctcaccatacagaaccacataccggggaatatccaagtgatcacttagccatgatgtgcgatttggaattagagttataagtgaataacctaatataagtacatcaatttttccttaattcactgttaagtggctgatttctttaaacttttggttcttaaagcaatgatattatatattcacttttcccttagcatatataaaaccatacctgtgattatgtctatatttatattaaattataaatatatgaatgcctatgatacagtaaaataacaataatatgattagaacctgatttatcagctttttcataagttgagtagtctaaatgaccctttctagacataaaatagaatgtatttttaacatatatctttaatggtaaacctttctctaatcttttagtcaaatcaaagttagcaagttagaatttatcgtaagctataaagattttatcactattaattatttctttaacgtcttctgaatgaaaagttttttgtcagtttgtccctctatttgttgctattgtctgggtgccttgacttaagatctccttagtttaatgtataactgttgacagcatagatttcaaaagcaagtgacttattagcagattgtatatattcctttatatatagttttattttaactttgatattatcatattgcagattattagattttaaggcgtttttctcttattcttcacctatataaatgtcattggatgtagaatgatgacacaaaccacctctagctgaaatgccaaaaaataatggcctacccaaactatgtattcgatcaaagataaagcattaattattgtaaacactcttgaagacatttcattgtaataaatatttgacagtttagtctttggttgagatgcttcctggaccaaagatatacattctaattaagacaagtataaatttactgttgtctaattcagtgatattaatttgaaattgtttaaagaaactgaaatattgtagacgattttttttaactgcatattatatattataagtatattattgaaagaaataaaaactctgaaaagctatatgtagcatataatatttatattttttttccaaatcatggatatcatcaatggtacattatggacttatttattagtatttcttaaatctctatagttgcttttttttggtatctcgttagtaaatcaatgccatataatagactttgatgctagacatattatttcagtcttgtcttgtgagataacctacttggttaattcttgtgaaaaatattgatctgacctaagttttcagatcaagaaggtaaatgtctaatttttcggaatctcacagattaaaatcacataaaaatcggaggatgtataatcacttttgtttagtcctagtgttacgtaatcagtatgattcggagaaatacctacgacagttctgtgtttttttttgtggtattttgtaggggaattttgctattagagaaaaataaaaataaaaacggaaaaaattaactttcttccccctaacattttggtttttctttcaaactagagttacctaattttcaattaacttatgctgttagtctattttgttagtctacaccaaaatgtaaaattgtaagtttaagtgatttctttgttgatttcaacgatatcacgaatcaagtcgtttctttgaatgtgattgtggtttatcattcacttgctagtggtgtataactattaattaccagtgcctttatctataaaaatacactaaagtggattagtagttataaattgctttgtcatcattgctgaacaaaacagtttaatgctaaggttagagtattgttctactagtaagacaagaaactctatctactatttaaaaagtataacaaaaaaagaaaaataaaaaagacaagcgttgtatgaaaagggattataaataataactggaataaaattattatatttactaggcataaatattcttgatagtattaaactggaccagttgagttccttttattggacttttttatgcttgctaatttttaaagagaatacttttgagtttaatatcttttataatcttatttccagggaggatatcatgatactaccttccttatactcatctaattaaaataaaaaagagacttcttgatcaacacattacattattctttctttcttttcttaaattgtctgaattgttaataaactttttggactaagtattattcgaaataatattaacaaaacaagcttatattttctgcgttacataaacatataagctaaatagtaaaagaataacaaataaataatatagtaaacaaataaacccttaataggcgttaatatttattcgttttgatccatgaatggtcaattcgattgactatcattcgatgtttacaatccattttattaggaataatgttctgatcccttttgttccctttaactaatccacttatatttgccatacatgtatattgtgtattcagtgtatcaatacaattactattaatagtagcagtagtaattactctttgatatatgtttcctttttaggcaattctcttaatctaataatttttctttgtttttctttttttttttttttgatgtatatgtattcgagccgttaataaaactaatttaaatagattcttttaaaagttaataaaggttgattagagtgttttcttcttcttctttttgtttgtttggttaagtcttctgctaattgtggcaccactatcctttgaacactaattaaacctttttttttccttttcgctcgatttactttttctttggatttacatttcagtcaattgctctgtcctgttgagttaactcgatcaaaccctttattttgtccacttatccttcgttaggcctaccaggaattgaatatatatatatatatataactacttgtcaaatcataagtgattgattgttgttgatttatggttgtgagttcaagaagattaagaaaataagaataaaaggatatataaagaaacattacttctctgtatttctttccataccgtatacacatatatttgttgttttacatcatttgttttaacttagtactgttaaatttatcaattatattggtttctattaagtaattttattgaatatttttattgtttgttagtcgttagtggtcgagtgtcgatttttttttctctttgctttttcttctgtttatatatgcttcaaaagtttggcaattaaaattatatttatttttattataagctaataattattattacatcctataccattcgtttttttgttacctacgtgttccatttcttatcattatttgaatatgcatcaattaacaaagaaaaataatagtaatagtagtagtggtaataataacctcaattttggggtggatcatgataaccagaattatagcttagcatataattcagttccatttcattattctcaaatgatttcatatttaaacgggcgtgctccttcatcaaaaaatcctggtcctattaataatactaatgactataatatacctgaaaatgtttatccatatataaatatgcctattcaacctcaatttgaaactaatatgtttcctgtttcatataattcagttccatcatcacaatctcagcccttacaagtggcttctcctgctatcaatgggatgatgactccgtttgatgcagtatatggtgccactttgttgccttctcatctgttaatgggttcaccctttgtttcatcaccacatacacagactccacaacggttttctcaacctacctttagtagaaataagtcatctaatggataccctatctactctaagtttaattcaaataatatcaataatcataatagtgatagtactaataataataaggcatctcaaggatatttggacaaaaagaaacatagtaatgctaataataatagttcaaacgaaaaagttcaattttcaaacggagatgtcgataaaatggaatctttatttgaccaaccatttcatatttcctataaagtattacctaaaggtgacgatgcctatagaacaaggtcgttattattagaaaatctagataggtcggtcgatattcatgaatttataacaaaatatgttaattcttctgatattgaaagtgtttattctattcaacaggagtctaagcagaatattttattaaatttcatgtcgactcagatatgtctcaatttctataataatgtacttcagaggttaaaagaatttaaattgggtttaaaatcagaagatatgaacttaaattttattttattaaaatatttgcaagacacgttatctgatgaagattcatcaactaatgataaaaaacatattgatatatctatgtttaaatttgactttgtgatagataatgccactagatcgattctcatagaattaaagaatgactatgatagtaaaaaggttatttccttactaaaagatttaaaattagctaaggataatagtataaataaaaggtatatccttgaatctatacaattattcaatactcccaaagctaataaaatttttagtaagaattatgttatactgacatttttaaatgtgtatatggctattgaaatattcaactatataaaatacaagagtgataagataaatattgggaaatgttattttattaatattactagtcccctaattacaaataggaatctcagtggtacagatttaagtaatccagaaaatattagtaggattaatagtgttactagtttcaaaaatttagataagttaaatacagggtcagtaagtttgttatcatcacaaacttctttaagtttagatccttcagtttctgatattacagcattattggagagaattgaattagatactaactgtttaacaataactgctaactcgtattctgaacctctgattgaatctttcaaagaacatgcaccaaatattacaagagtatattcaccaaagtcatatttacaaggatctaattccaacctgccaactccaatgcctcttgacagaaatttccaaaacaatagaactgtttttagtcctatgaatacaaatggttttactccaaatcatggtatcttagtcccacagacgcctatgggtatatctactccaactttctacatgaaacaacctccatttaagtattctaataatcttccacaacctataacggattcattagaagatcaactaaatacgtcagctaaagtagcatcagcgatggggagtgatgttacaaataggacaatatatattggtaatatcaatccacggtctaaacctgaagatatttgtaatgtggttcgtggtggtattttagaaagtattaaatttattgaatctaaacatatttgttttataacatttattgagccatctgctgcagttcaattttatgcaaatacatttattgatcctataatactgcatggtaacacgttgaaaattggatggggtaattattccgggccattatctaaatctatagcattggctgttactgtaggagctagtagaaatgtttatgttagtttacctgaagtggcttttaaagataaatatattaatgatccagagtatgaaatgtatcatggaaaatatagtctaccttcagaaaagcagttaagagaagatttttcttcttacggtagcattgaacaaattaattatctaggtgatagtcattgttgttgggttaatttcatgaatattacatctgctattaagttggtggaagatgctacaaataactttgaacaattctctaaaaattttaatcatcgctacgatggactgattattaattatggtaaagatagatgtggtaatatgaataaaaatctagcattgaaaaattctaaacttaataagaagatgaagaaaaataataaaggtaaaaaattgaattacctagaagagaaaagaaaaaatcaggaaagtatcagaaaaactttcccagggacaaatgacgtttactctggtatacttaaaagtggaacgaatcaaaatgataatggtaaaaatattgatttacagaaatttatacccttggattctttgggtattactatcgatacaagtaatcatattgatgaaactattaaaacagaggaaacatcactcaatggagaatgtcaagatacaaaaagtaatgcaataggtgatgaagataacttagataattcggatatttcatctgatatgggaatagtagtggatggaaatcatcatttaaatggtaatagtaataagttagaatcgaatacagattatggagataggattggtctaggcataagcaatagattttccagtaataatatttcatcgttatcgtctatatcatctcgggaacaaacagaaaacaatggtgatggtcaaaaatataaggatactaataaaaatagaaagaatgacaatactactaaacatggaaggacaattcctggttctgatgttatggctcaatacttagcacaactacaacattccacctttatttatgcagcaaatgttctaggtgcttcaagtgaacagtcagatttatataacggtggtgaataaatgcggtatttgaatcttaaatatttgaatgaatgttcatgtgatgatatttatttataaatatatatatatcattagatgtatatagaatgatatagattataaggacagattaattgataaacagtacatggcatgtcttgaaatacgcttttttctgtatgcataatgatacaaacatttcttagtttccatgacaactgttctcgatatagatctaaaaatattacctttttaggaaattttctgattactcagcaagcacgttttttcttttgaatctttattgttctctttatatatatgattaaagtattataattctaacatataaagaaaatatttaaatgtgatatatatgtgtaaaaataaaattaaaataatatccttcagtattcatgcatataaagaacatttacaacttcaatatttaaaatgtctaacaaatcaataaaggtaaaatggatttctcacttaataggaagtgtgtatctttgaaagaagatgttaagagtgaagaaatgtcttttactagctctgatataacattcaaagagaataaccaaaaggaaacatgtgtgactacatggtcaaatcccaattttgttatccaggatgctaatgatcaccagaagaacaatgtgaatgggggaaattcgaaatggcagagatctgattacttcgatagtacttttaaagaatgtgtatttgttggttcttgtatgatgagtcaacttttgagtcaagcatgtactccacaaaccctagctataatgaatattatttcaaaatcctttgatagtgataggagcaaccaaccatggttaatggcttcctttccattagttgcaggttcttttattttaatcagtggtaggataggtgatatatatggattaaaatggtcgatggttagtggtaatttattctttgtcttgtggtctattttaagtggtgtatcaaagtacactagaagtgatactttttttattgtaagtagagctttccaaggtttaggtgttgcatttattttaccaaatgttatgggttgtgttggaaatatttatataccagagacccatagaaaaaatattgttattgccctgattgcagggtgtgcccctataggtgcctttttaggtgctatattttcagggttaataggtacaatggataaaaatcaatggccatggtccttttatgccatggcaattgcatcagctataaatttgatttcggcaatttatagtactcctaaaaatattccaactaatattcatggcttttcgatggattgggttggttcaggtttagccatagttggtttaatattatttaattttgtttggaatcaggggcctattgttggatggaattgtagttatattattgtgttattaattatatcggtgattgtactgatatttttcttcgtttatgaagtaaaatatataccatctcctttattgcctagagaagtgactaaaaataggcacatgattatggttttgatagccttatttactggatggggatcatatggtatattcagttattattatttttcctttttacttaatcttaggcattattctgctttgtatgcaggaacaacttatttcatgtttgctatttggggttgtattgcctctattgtggttggtttctttattaaaaaagttaccgctgctattattttgttcatctcaatgattgcatttgtgataggatgtattatgctaagtgtgactccagtggatcaaagctatttccgtatgaatcttggaactatgattattttgagctttggactcgatatgtcatttcctgccgccaccattattttgagtgataatttacccatgcaatatcaaggtatggctggttcattagcaaacactatggttaattattcaatgtctttgtgtcttggtatgggtacaacggtagagagccagatcaataaagatggatctaggttgttaaaaggttatcgtgcagctgaatatttatcagtaggcctctctggtttaggttgtgtgatttcaaccatttatctatgtgaaaggatgtgggctcaaagaaaaaatcgacttaaagccacgaaaattataaatatttcttaaacctgtgggtattcaacttgttttctttttttatatattccgtgatagattattaggtatgtatggttaaatttcagtagttataacattgtttaatgttaatcttaacgatattacttttcttcattttttttcatatgaaaatatgctggtttatatagtctttacaggataatattttacaatctctataatttaccatttgttagtttttaaggaacgaatctttttttgaagcattccttatctctaataaatcatagatatttatctattttgaggtctgtttgaaaatatttataaatacatagaggtcaatgggtttgtattttaattttttttattaggtctttctctatttgcaatttctctaagatcgtcatcacttggttcatagatatgccatattgtgtaatgtggtaagccaccaactttataccccattttctttgccattttaccaaaagcttctgtttcagcgtgattttcaaatgtgaatgcagggaaatgaatgccatttctgaataattttgctctggcaagaattgaaacaccacccacgccatctagatcaacaacctggtttggatcaccggtagcctcacgaatatatgctaaatgtactctccatgttggatattctgcataaccttcaacaatgacatcatcttcatccaaagttttcgctaattttaatgcttcgtctgattccatccaagaattcagatcatagggttgttgaccatctagaaagccaggtaatggtcgccagacatttggaaccatgatatcataatttttattcatcaaatcttgtatgattgaaccaggacaaaattctacgtctgcatctctccaataaacccacgcatgatatggttttaaagcatttgccattaaccaatttctagcacgacccatcaattttcttctgataccttgaactttaactgcatgtctatcactaaaaccttgaccaataacttgaccaaaatttttttcatagatttgaactgatctgaatggtttgtcataattatcatgatatggtggtaaaaatgcttttttaactttttccaaatattcttgtgtcatatattttaaataaagtttcttgtttgtgtttgaattaatgtaattttggacaatatcaatatcttttaacacatcacttagagttccattctgcaaatgttgcacatatgtctttaaagcttgcaaagtgttatcgccttcagaacaatcactaactaagaatgccaaatcaattaattcgtgtggatatgttatgttcattaaatttctaaacattaaaggtaagacttcttcagcatctcttaaaggtacgcatagtaagatatgatctctttgctcttctccgtttggattcccattaaatttggatagatcatataactcaattgttgagtcgtataattggcttaattcaaaatcataaacttttttattttctagattatcaattctatcggaaccaaattgggataataaataatttggtataccttgatcaaatttactgattatattatgatctatagtttcgaaatcataatcatagtattccttttcagttaaaattgttgttttataatttgtttttgtattgtcttctttcttttgcaaattggcaatatactgatgtatgtcataaggggtattcaaatataaacacaatggtacgataatatacttgaacaagataaagctgactccaattaatccaattaatgacaatagagtttttttactatttagtttattaatattgaagggaactaaaagtttctttcttggttttaatttttttgaagttcccaattggttagaattgtcatctgatttcttagtatcattataagttggtaaatgatggtctgttttgcctttcctccaattcaaaaacgccatttcggtgatcgttgtccttgtcaccttctttcttctatgttattttactttacctggtaaatacagataaactagttagataagtcaaatcaatcgaataagacagttatattgtaattaaataaacagaacacttgtagtctaaacttgaagtaaaaatggataaaaatactgatttttccaaaataattgttatgttatacctgacttattatttttttttgtattatattattattctagttttattttgcaattgaaatcatcttatttaaattttttaatcttttcagactttttttttttcaatctttttcaaatatttttgaaggccgaaaagaaaaagttgaaaagaccaaaagaatgaagtcggctgatattttggttttgacacaggaaagtgtttcccaaaaaggaaattgtttcagaaagcacaccttttgcgctttacaaaatacttttctccttttccggaaaccttagtatattaaatacataagtttattgaataattataactagtgtggttttgtttgaattaacaaattaccatgagattgagcatctggttttatgatagcctgacaaagtttattaggttgtcttcagatttcctatgttactgggagagaagtaggaaaaagcgggcttaggtattggttattcttctatattacttctatatcctctagactatttacatagcttttataattttccacatagtcaagccaccatcgaatggtttttgaaataaccttttattaatattattacaaaaattgtgattatataaatgcatgtactttttttttcttttttcattatgcttacaaagccaaaaaaaaaaaaaaaaaaaaatcattttgttgttatggaattaggtctatgataattattcaaaaaatgcttaatctatatatttagatccttgttacttgcacactgtatgtctgtattgtctcctttatgcttaactttgcattattttgtagtaattttcaatttgaactatgtagtcgaggaactagatatattcatatatttattcattcattgactttagatgtttctttattatttaaatcggtttcagtagggctttttattagttctggtggttcagttaacgtatgttcaatagatatgcttccagatgatgctgttgttgtatggtttttgtttatttccttatcatgattaattgtaggagtagagtcagaagtaggatccgggagggaattattagtaatttgatcgttttgtgtattagaggtattgagagtcttttcattaattatagtgttggttgtgtttgtgccatgggtattaggaatactctcatcattatcatcactactttctaacccgccaaataaacctaattcatcgtcgtcttcatcaccatttgcatttgttgcagaaccgcccactaatatttcagtgggtataatagatgatttcaaatgtacattgggtatttttagatctggtgtaacacttttaactttttctaatacttttgaattggctaattgctggtttttcaataaagctaaagtttttaattcattttcttttctctctctttcaatgatatgttctctgatttggcttattcttttatctctttctttaattgcttttttcataacgatttttttcttagctcttaatgatctttgactcattatgaatttgtttaaatcatcttctaaaattccatttatttttttattatcgaaacttgtcttaattctaaattcattcaatgaatcgttttcacttaattgatcatccttacttgtattacttgatatatcgtgttgttttaattcatggattagattaaaaattggattctttgtgttcataatgctatttagttcgaaattttccactcttttcttttctaagttgatcctaatctgtgaatatttagcaatatcaaaagattttctattgtaataaaaattaaaatcatggttaatatatgatttagtattagactgtacggatccaaataatgctaacatttcatcgtctatttgttcgtgctgttgttgttgtttttcttcttcttcttcttcttctttttctttgctattgtcatttgagtcattaacaatggtaggagtggtatcttcatttaaagagtaataatctaaatcattttggtaatttttaattgaggttaaataatgtaataaagtcagttcgccaattttactttcattaaagagattttttttaataattctttcatctgttacaaagttggtgaattgtggagtgaatttataggtatggtcaggtggtaattcaggtaaattaatattacaattaaagattgggttggtaaatgtgttattcgcatctttatttgaggtagaggtggatgttgtatctgtatcatttggaatcaaattgtttaaatttaaatgtttatttattaatatttgatctcttaagaggttatcgatattagtagaggtagattcagggacagtagaatgtgagggagggtgtaagataaaatccacaatgttggttgtattactgttgatattaccataaccagagtttagtctttcatcttttaagaagttatttaattggatatttttgtaaaggtcataaggatggatattatagccattaagccaaatatttaaatcatcattcgatacaagcaatctcctttgtaatagcataatcctatttaaatttttaattaagtcatttaattgaaatttaatcaaatcaatcaattggagaaaggcaatctttgagaactttacattagaatctcttaataataatttcaaatgtaatgcaatagatttaactaataaattgtttatatttgaatcaataggtgaatttgcatttggatcaggcttttggatttcattaattgaaggtgaacccattatagtaaaaaaagtagagagggtgggtgagagagagagagagggaagaaaaaaaaaacgaaagaaaaatgggaaatggttcggagagagggtatatctatgtcgcagtcttgtgcacatatatatatatatatattataaatagggtatccaagaagataactgtaagtggtagtgacagatgtgatatatgttacggttcttttctctctttctccgttcttctctatattttatttttttttttttttatcttcagtttctcactctttcttttttttctttgcaaaaaataatttgtgatgattaaagagaaaaagggactagaaaagaaaaaaagagcaggaaaagagtcgaacacgggaaaaacacattcgagaacaccaagagatattttgtaacagttaccataagagagagaatagaagaaagccatccaatcatagaaaggaggtatcattataagactttttaatccatgtagatcataacatgtgagataatgtatattgtattccagcaccatccattctgatactattacattttacaagcagtgatatgatcattgttggatgtatgggtgtgcagtgggctaacaagatgtgtattgttatcgtaaaacaatacaaaactttttaaattttttttttattttttttttttattattttttttttttgtttggttcttctattccagaagcctaaaataaaagtaagttcatgagaaatacagacaaactaactatatttgcaataatttgcaagtgaactaaaacccattctagttggatataaagttgtactaataatattttggtagtgtttttttttgttttgttttattatattttcacatcttgtcttttttcgctagcaagacatctaaataaaaggttgattatattaataaggtattgctaagaaatattatctacgttattttcacagacttcatatactcaattgtatatttatctatataaatcacagttctagtaatggcaaagacattagctcaaggtaggaaaccaggtagtggcaggaaaccaggtaaagctaaaacgttagctcaaggtcggaaaccaggtagtggtaggaaaaaaagacaacaacagcagcagcaacagaataatattatcaatacaattgaccatgcagataacaataataataatatactaactctgtctcaaaatcagttaaatgttaattcaataagtttgcaatctaatgaacttccgacaaataatgataatcataataataaaactgacgatagtggtatcaataataatctacatgaaaaacttgattcaaatgcaaataatctatccactagagatatggttgcagcagacgctttgagagagctgactcaaagcccattaagtttaacatccagtaatgccaataatcaaagcagccataataataataataatcatatcagcagtactatgtcaaatcctgcaataattgataatttaatgttaccaccattaaatgaaataataagctatacagattccatgaatccaacagatgcacatggtcatcatgacaatggtaattcaacactacaatatataaactctaatgattcgatagcatctcctttgaatcattctgaagtcagtaccatatctttcacaaataaacttaataacaataatggtgataataattcaagtcacacgtctgcttctgtttcagctcaaaaaaattctgtataaaaaaacatataattcactgaaaaagtgttaaccatcgttgcctcttatatatgttatcatgttcttttctcttatttctttgtttttttttttttaagaatagaagacaatagaatagaaaatatgtatgaaagcaagaagaatcaagacagattccatatatatatatatatataaatacatgtgtatatatgtagatagatagatacatattattatcaataatatgattgcataaatttctatgacaagataatgctatatatatgttctttgatataccaagttataaagtctatactctgttggtcctaaatcttattagtttatcatttaggttacagagtttatttttttattgttaatacaaacgttattcttttgtttatttatctaaggtatccttttcatagtacctgaaattttcatcttttgtttaaaagttttcgctttccaaaatttttcctttgaaccctccgtaagccaaataactgaaatataaatatataaggaatcatcttgaataatataaaaggtaatcataacaaaatgtgtagacattgttgaaaaaaactttattttactgcaaactaactgtcagttcataaacttctatttgtgcactcatataaaagttatatatattttaaaagaccagagaatttatgtaaccaatatatatatatgtatatatgcatacccttgtgtatacattgaataaacaactaaaatgtttctaataatttatataaagtacactcataatcaccatcttctactttttttttgttatattattggatttcattactcatttgatattgttttgcacaaatatcacgtttatattttattattaacaatcatattgaaagtaaaacaacagaaacaagactgtttattcgaacttattagatagtgtgtcgtatgtaaaccatttgatccttattagaatattcacaaaccaaaattggtatacatttttttacttttaaatattctattaacagcttcctcattataaagtggctgcatacctcttcacagaattttgaatattagaaacaataaaagtaagaaataatattagggttccctctttttttcccctcgatgttttttttattttatggaatgaacaaaacaagaattatggtttctttcctaacacactttttttttcttagattttagcaaaaatctctataaaccctaatcactttttaaaaaaatatgacaaaagaaaaaaagaaaaaaaataaaaccctagaaaaaagattcactataaatgaaagactcaaacacttcaagaaataacagaaaaactgaaaataaaacatttacatatcatagtatctcaaaaccatctctctaacacaacatatacatacatatatatgaatacatgtattttatctcagataatcccttggatatcacattatcaaaccttggcaccacgactgaaatatactgtgtacgtcaatattaacacacttatacatttctttttactttaatggattcattagaagcaagattaagatttattagcattttgaaaaaccttcaaaagactttaaatttgatagatattaatgatataacaaccaatatcaatgaacctcctccacaaacaccacagctaccaacagcaagtaacactacactacctacaaaaacaaatgctaataataatatcaatagatccataccagataataagaacattaacgacaatagcaacaataatatcagttcatctgtaaataatgaagcactgacaatttcaacatcaactacaccatcttcttcttcgttatcattacaatcacaaacattcaatttatcacatacaactacagacaataaaaatataaatccaattgaattctacttgcaaaattataaagaccattatgaagattttcatcaatgcttaattgacaccatgaagaaatttaatgttttggacagactaccaataactatatactatttcaaattaatctatttgttgtattatgatattgataatgagttaagtcgtaccattttaacccaattcatgatcccatcaataatggatgttttagatttaatattacctgaaagtgatataatatcattgacaaatctaccattatgtgaagatatgatcaataaacttctaactagccccaacattaccaagattataaataacaatttaaaaaatcaattatttgtcttcttacaaaaacgctctagtttcaagcaaagtgtattggatggatacagtaccaagcaagttattactattaaaagtggacaaactgtagagattccaacgattttaaatagaatggagatagatagagatagacataaaagatcaaaggagagtaactggaagattaatcgaactccaatatcttcgacaggcccatctgcttcaacaggatcctccatagtccaaacaatcttagatccaaatgaatttaaaaggcagtgggaaacaataagtcccttaaccagtaccgatattcaagatacgaaaatcttaaatgagatctgcaaggaatcgtatcttttacaataacgagtgattaaccattcactgccatccctttactattctttagtctcgtctaatttagataaaaatctttttacatatataattatcgcactaacgttatctaacatcgtcgcatttataattccgtcatttgcccgaggaattttttttttgtctatttttggttcgaatttttgtaaagatctctcgtgaaaaaaaaaaggaaaagcatcatctctttctagaaatgtgataagataatgaatatataaatctatggatgggtgacaataaaaatgtgtcaagtaagacaaaggtaggctgtaatcgattgatatacctgaggatacctatcaacgaggtttgcattggaaagttttatattttctgaattttatattctttatattcttttcagtctagtccgtcagttgtgataatacatacatacctcactacatatacatatctatatctattccctttgtatctacttttaaaactttaatgcggataagaaaaatttaaagtagttagaatagaatagctcactaatttggatatatataaaatatgagagacaatgacaccggttccctacaatcaaatctaccaaataatactaacaacatccacaatattaacaataatagtgcaagtatacagtatgcaactacaaaccttcgtagacccaagttagttgcatcaagaaccgaaactagtattccacatcaaagagcttcaaaatcattactagccgcatcaagtaaactattaagacctataaaaactgggaataaccatagtaataaccatgacgctattaccaacaatattaaagagatcaaagctgcgtcaactagtaatttaatgaaattaggtagatctgaattaactagagggttcagagacatagctgttccaattgaagatccaatagattttaatcctaacttatttaatatatcaaataattcttcatcaaatagcttcacaaatcaaaaccacagtaccaatagtagttatattaatatactggtcaatcccaattctgttaacacatatacatatggaagtaacatagatctttcaatgaaacataatagtgatatttcagataatggaaatgatacgtttgttaataataactgtcaagacagcaataataatttcagtagtattaaaaataacgattttaatcaagtgaatcgatcaactgcgtatgttgatgcagaatctttacttgttgatgtattaccatccttcgaaatgtataatgcattacatagacatataccacagggaaatgttgatcctgatagacatgattttccaccaacttatcatgaacaagaggaaaatgtacaaccaaatcatctacatatcggtgcagaaacaccattcactgataatttacaatctttgaatacagtacgatacacaatttccaatgattcaccatttcaagatgatttgaacgattctgataacataaatatagaaaaactgtattctttacctaaactgaccacatccccaattgatatcgatattagaattaccaaaaatgcagcaaaaccacatactgccaaatatgaggaacagtcaatgttaaaagagtacacgaatggtgatattatacacggatattgcattattagcaaccattcctcacataaaatcaaatacgaaatgttttatgttactttagaagggtacatatcgttaattgatagaaatgaggggaaacgtactgttaaaagatttttaagaatggtagatctaagtgcatcttggtcatacacagatattgatgtcagttcaggtatcaattatactccaggtgaacgggatttatatgatgggacacatattggtttaactaacaatagaactttagaaccacatacaaaatataaaaaattttttatgtttaaattaccacaacagttattagatgtcacttgtaaacatgaacactattcacactgtttactaccaccaagctttggtattgataaatttaaaaatcatttcaaatattctggtattaaaataaatagtgtgttaggttgcggtcacatggggattaagggatctccaattttgaccaacgatctttctaatgatgatatgtctattaattacacaattgatgcaagaatagttggtaaggatatgaagactcaaaaattgaatttattgaaggaaaaagaattcaatttaagaataataccatttggatttacagcaacgtatgcatcaaataacaatgataattctgataatatgagaatccagagacaattaaaggatttacaaaaattgattgaggaaagattatctgcgttggaaaaaattttcaaaaagttaggattgaatgaacccatcacaaattctgatgtccatggaactgatgtaagtggtacttttgacatgaatacagaattagattcacaagaaattttaagaagaaagttagatcaacttcatgtaaataatcgacttgacgataacaactatgatctttcgaggattaaaaatatgtcaccaaaggcaaacactgtagaagcagaaataagttacagatataagagtagaaatgggaaacatttgtctactgtaaaaccatcaatatctcctaaaaattcatccaactccatatctactttatcaaaatctaaatccaagagtaggacaagcacacctcatattgctaatggattcttttctaccttattagggtcctcttccacttccagctcattgagttcttcatacacaccttccacatcatcattgtctttaggtttatcaacatcgacaaaaaaatcgtccattgatattcaacgttccaaaggaaaaaattaccaatctaacaccagtaataataatgataacaacaacaacgacaatagattaatggtacatgatacggtgacaaatgaacactctaaacattctaaatcggcaaacgatactataatattatctactaaggataaattttcttcctcaactaagcagaaacatattatatctaccaatcattcaaaggaaaatgcagggctgatagtgttgactgccagcatccctaaacaggcgttgccatatacggcaccatcattattaaggaagtctaataaatttgaattgaaaaataaacatgatcaagagaattggatcagactaatggagcttgtgctggaggaggaaaagacaccgttaaaggaaataccgatcaaattaacgtgcatattatcaaacaacagtttaccacatgagccaccaagggtacagtcaatttctactcaactgattgtaataactggggtttcgcataattcgatatctattaaattaaacactaaaattttaatgaataaagaaaaatgtgatgatattaaagcactttttaagagctatagagacaagataatcaaatacaagagtaaatttaatgaaaacgttgataaattaaatgaattatttaatattggtagaactgtcacgacagcaagagaattacagtttaaagatttcatcagccccttaatgttatcagatatcgatagtataatcaaccttgagattcaaagggtggaaatcaatgatattttcaaaaaacaaataattgatccaaataatcctgaattagaatggagaactaaagaagatagtagtaatacagaatttgaatctattcttaaagttaatttagatttcaatcaaaatgtcagtgaaacgatcattccaaatttcgagacatgcctatgttgcaggttttattgtattagggttcatgtcaaatttgataatcatattggagccacgcatattgatatcccagttaatgtaaaaaaatttaatctttagaattttaaaaaagaacggagagacagacagaactatttaatatttaacatttgattttttaattagttaactatacaagaaagaataaagaaaaagaatgaaactgtatatacatatgtagaagaagaataaatagaataaaattggagtatatttcttgcacatcccctgtttttttatccctattgcgcaactatttcatgctttgataccccaatgaatagcacaaataccgaaagataaactttcataaccaacagattggaatccagccttttcaatcattgatttaaattcttcttgattaggaaacctttcaatagattccactagatattgataagaatcataatcattggctacaatggacccaaagactggcaacattttggcccattgttgatacacaagatcgaccagctgattctcgatctgggagaactctaagcaataaaaaattccgcctggtttcaagactctataagctgtattcagacctgcttgaatatcagtgaagtttcttataccaaaggagacggtgtatatatcttttgagttgtcttcaattttatctaaaatttctgcattttggatcaaatacctgactcttggatccttgtagtacctacccatattcaaagctctcttctcaccttcctttaacatctcacgattgatgtcgacaacgtccatagtggagacggtgtcaccatgttttgatttagcatagtccaggataccgaatgcgatatcaccagacccaccggcaacatcgataaaattcaatggttccaaagagtttggtcttttaccaggatccagtttgttgatgaaatggtccttccataatctatggatccctaaagacataacatcgttcatcaaatcgtatttggatgccactgaagagaaaacgttgccgaccagtttacttttcatttctgtcggaacgactttggaaccaaaatgggttgtatcattattaagggaggtagatttatttacattgttcaataatttggatgtatttgttaatgtcctgtaaagggttcttgcggtagttggagacttaatcatttttttgttacttgatatatacttaatgttactactataaatactaatactactaatagtcaaaagaaaatactatacacacacgcacacaagcacacacatatatatatatgtatgtatgtataattaagttattatatttgcaaattcttctgtcttagtagatagcattactaaattttcagatagtccttttatttattttcaccataataaaaacaaaaacaaaaacgaaaacaataagaataagaataagaataagaataagaataagaataagaataagaataagaataagaataagaataagaataagaataagaataagaataagaataagaataagaataagaataagacaatccctccatctcttgagaaacaatcaaacaacctcttaaacaacacacacacacaaatatatatatatatatatatatatatatatatgaatgtgtatgtacgtgtatcctactatgactgtttctaacgatatgaactgagatcatcaacaatatataacaggacacaattcaaacctaaataaaacatcattttcctttttctttctttctttataagttatgaatatctaaccacataaccttgtaatcagaatcatgatgtatcgtaacttttgtggtcaaaagattggaaacgaaagaaactgatacctgtctgacctgatttctcttgtaagtaacaataatgataacactgatgtatattgaatcggcggaaactgccatataacgttgcggaatgtacggaatgtacggcatcacagcggttttttatttctttttttgtttctttttcttttcttttcttttttttccagtggagcggcagagatcgccaaaaacaacaaaaaaaatggcaaactttcgtgatagttgaaaaacccattcttctccattatccccccagtatatccaggacaaagtttcctgtatggagtgaaaagtaataaaaactcgagcagcttaaagacaccacgaaagcatacatccatatacacacattatattcgaacagatgtatgtgtaggaagatccactggtgatttgatttatacttctaggaaaccaagtcgaacaaactaaacaaaccaagcattacttcacacatacacacatatacacattttctttcttctcttctctttccttttctcttcttttgttatagattatagaatattccattccttttttccttttatatttatcatattatagacttatatacatattcagttctgtccacatccattttctcccattttatcttctatcttttctcattattattattattattttttagttacattccattcaagaaacattcctacacacacatacacacagatatatatatatatatgattcaactatgtcaagccaattattaagaaacagaaatagtgaaccaattaaaagatcaatcatatcagatatcaaagataaaagaaaatcagatgtcttaatagctgcaaaatctttagatcacgaggtccaaaatgttaaaaatttgaaaagattgtctattggatcaatggatcttttaattgatccagaattagaattcactgtcaataacaataaatatgatattaataatgatgctatcatcactacaacaactactacaactgctacaactgccactaccattactgctaattgttcagagtttgaaagtgatgaagataatagtattgagatcaccagaactgaatatcttcatcatgataattcatcttcatctttagtgttgagcaataatttcaccaatagtgataaccattccatatcggtcgattcagataaaaatctcaatagtcaatcagcaaaagataataaaattatatctaatagaagattgagtggagtcggatccttgaaaagaggctcaaacaatatttatagaaacacaaggaaaccttcgtctcaattccaaacacaagacaatgatctcactgccaccaacaacaataaagaatcttctgcttcaattgccactgcaaacaaacacatcaagaacaatttgttatgggttcccgctagtcaacatccacatgttaaaccacaaaattatttagaattggttcaagatactttgcaaaatattagtttggattctgatatcatgcaaacagccgactcgctggagaattcagaaaatgttaaggatgatgataaacaagtacatcaaggtacattggatgcagatataaataaatctctaagaagacacagttctatagttaagagaccctcaatactaagaagatcttacaatggttacgaaaatgataataaagaagatgtatcgacttccaacaataataataatgataacaatgataacaataataatgctgataataataatataaatcacaatacaaacaaaaactcaaccataaattttgaaggtaaaagatctgtctcattgaaagatataactgaagaattgactaggatttcatacagtgtaggattaactaataatgatgcaatcacactggccaggaccctaagcatgacaggatcatacacaaatcctgatctatccgataactcagatagccttcaagatcttcacagtagcctatcaggcacagataatgaaaacgaattcgcctcaaatatgttaatgaaaaatggtatcacaatcccaagcagatcttccttaagaagaagtaaattcaatacttataaaataaaaggagcaactccctcaggtataaccgataaatcatctgctttgaaatatagcttatcagatgaactattagataggagaaaacaattgccatttttatattcaaacaaaaaaagtaacactaattatacccataacaacaataacaacaacactaaccgtagtataagtgaacatcaccaatactctaatagtacagaatctccaggttcaataagtgatctatatgatcattatagacattctagcggtgattgggatgtatctgataccacatctcaattacatgatggggaatctcatgaatcacatacttctcaagatactagtctcaactcacaagaaacatcaaacgatagcgtattatatagaccttcccagggacaacaatttatatctgaaagatttactgataatacaaaggaacaaatagaaaatgagagaccgtggtcatggatcgatacagaatctagctcggataatctacaaaattttactgaagatagagaatcgatagaaatagagggtgacaagctagacaatgatgatcatcctgattttattaatttgatggttgtcaccaaaaataaatcttctgaaaagattaatcattcaaaaaatcgccatttaccaatatttaacttaaatttatactctgaaagaaaagaggaaaccactaatacaaaatcgaatgataaaacaaacacatccaaacaaaaaaatatgtctgattctaataatcatagtgtcaatgaactaattgattccagtgaatcactacaaaataactcgacagcaaataccatcaccaccaacagcaacaataatataaatccaaacaaaaatgataatgtaaaaaaatcattactaaataataacaaggatgaaattccagaaacaagaaaagaaacattagaggagaaatttgtaaaattatttaagagaagacatcacagtaataaaaccacaggatcctcaagtatcaaagggttctccagtaggtcacagactcaagaagaacttagaaaaaaaatatctaaatttagatcaagaaataaaaaagatcatgttaataactcgcctacaaacaagaataatcctactaatgaaaataatattaatacgaccactattgaacagactaatcgtgagataaatacgaacttttcagtagatgatccaattcataggcaaatagccgtatctgaacaaccaaaaatcaatgtcacattacaagacatgtcttatgatggaaaaagagcaaatagagaaaaagaaaaaggggaaaagggactggaagtcaaagaaggaatagaagaagaagaagaagaaaaagaggaagacacaactacattacctgctcttcaacccgctgtcagtgttaccagttctaaacagacaaactcctccccaacatccttgcaactggaaaataacaccaccactcttacaaccacctctgacaataatggtactcatgttgtggagactgtttgtgaattagatggtgatgaatctcaagaattaagtaattcggagttacatatccaagaaaataacatcaccacatttgtagataataataacaacctattaaagaatgacgctcataacaataatagtagccatgaatcatctgcagattctgtagagaatggagttccaggtgtattaccaccacgtaaattgacctttgcagatgttaaaagacctgagagacctaatgcaccaatccaattcacagatagtgcttttgggtttccattacccatgctgactgtatccacagtgattatgtttgaccatcggcttggaatcaatgtggaaagagccatttatagattaagtcatttgaagttaagtgatccaaagagagagttaagacaacaagtgttgttgagtaattttatgtatgcatatttgaatttggttaatcatacattatacatggaacaggctaatgcaaacaatattgggaatatgccgggtgatggatcacaaatgaatacatatggggaacatataaatcaacaaagaatggtgggatccattgatgaaaaatcaaacattgaggcaaacacaaatgcaagtacaagtgcatatggaaattcgtatactacagaacataatgaatcgaatgaaagtattataatacctgatatttcctaactataacaacaataaaataaaaagaaaaacagggaaaagggaaaaaaaaaaagatctttttttatttttatatgtaatacatatttatacatatatataatttgcattaattgaaagcatgtttgttcattattgaaaatgcccattaacaactatttttcgactatattatcttatgttgtctctatgtattcttttctcataaatttatttacttatttatttacttatttattttttaaagaaaaagacaaacagttatctcttgaagcggatttagaaattccggaaaagaggaattagcgaaaactcgatttattttttaaaaagaaataaaaaagaaaagtgcaagagtaagaaaaaaaggaaaaaaaaataaaaattttttttatagagatatgcaagtatatatagatatatatatagatatatacatgaataattcagccaaaaagaaaaaaaatttttttgtatgcatagaatgtgtaagtagtgtacaggtccgatctaagatatataaagagtaagaaagatgtctggttcagatggtaattatcgtatgcttatacttttagaagaaaaactcgatgacaatgaagtagcaaatgaaagtcaagatatgaaaaacgagggtaaagtaacaacagttagaaaaacaagtcatgagtatttagacgaaataaatctgccatttactgtggatgaattagatatattgaacgaatggtttgacaaatttgatgaggaaatatgtatacctaacgagggacatataaaatacgaaataagcagtgatggactaattattttgatgttggataaagagattgaaaatgtttatcaaaagattttaaaatttgttgaaaatcatcaagctttatgaatatattttctgagactgtataacacaaaaagggaaggagaactacgagttacgacaggaatacaaggattcagtccatttgcattacatcattcttaactatattctaattctaaactaaatatgaaaactacaagagactgcaacatttatagaccataaatacaagcacatgtagaatatatacatatatatgtatatttgtcatattgtaactcaagaatcaataaagttctataatttcctattccctatacttcctcccagttcgattcccattgtcttccatgtgtgacaaatcttttgtgcgtttgtgtttgtgtttgtgtttgtttttatttttatttttcgatcctcaaattctggggttctcgactctttaaagtcttgactcagttttgctttgtttttttttttgttttattttgttttgttttgtttttttcctctttggtttcttttaaactatggaataaaaaaaacaaagaaacaaaaaaacaaaaaaaaaatttttttttcctcactctttcttcttctgtcaattcagttcaaggtttatattttatgttttgtgttttctctcgttccatcccgttgctccttccaagtaattagtttgatcacacttatccatccactcactttgttctaccaaactctctctacattctctgttggattcattcagtagaagtgtagacaaaatcaaaaaaaaaacatcaacaacacaaagtatagcaacaacaagaacaacgattacaagaagaatagtaatagtcatagtaatagtaataatcataatcatactcataaccatagtaataataatagtaataataatgataatctattatggcatacataaactgttctcatattatttcactctctattcagttattttttctggcttaatttcttctctcaagttgccccaattgatcttaatgtctgctcttcatggttctcttctttttttttttttttttttcctttttctttttttcctttgattttttttctcctaggccattttgttttttcttttcttttcttttctgtcctcttgcatgtttcactgacaaccatctttccgaatttttcgtcctgtcttctctaaagcttctctctcttttgctctcctgatttccttttcactaaaagtgagctaatcttttctcttagcttgcattatctatcgttcgtaatgtcaggagaacaaaaattgaacattttgtacttgtatatcttttgttcttattttctttttttttctttttccatttttcattctttgattctatatatcaaagtttgacactatataatactgcttttcgtttccagcctgcatagatatttcacctaatctttttaaaggaataaaagtaaaaaaaaaaaccaaaaaaaagttagctgtattaatatttatatacctatcaacattgttgttaccatccgtgccgttgcttctttgacaaaaagcaacgatccattattactaccactcctattattgttgttatcactatcatcattccttcttttcaaaactgttacagcatagcttagtatagcatagtatagcatagcatagtataacatacatatccatatacaatacacaagtgtactcacatacatatctatctatctatctacttacttaattttttatctatttatttaatttttttttttttaaaggaaataaaagaataataataataacaagaacaatgccagttatacttgaagattaccaaaaaaacttcttagaactagccatagaatgtcaagctttgagattcggcgaattcactctgaaatcaggcagaaagtcaccatacttcttcaacctagggctcttcaacacaggtaaattgttgtccaatttagctacagcctacgccatcgccatcatccaatccgatataaaattcgatgtcatttttggtcccgcctataaaggtattccattggcctctattgtctgtgtcaaattgtccgagatcggtggttcgaaattccaagatatccaatacgctttcaacagaaaggaggctaaggatcacggcgaaggtgggaacattgttggggcatccttggaaggcaagagaatcttgattatcgatgacgtcatgactgccggcactgctatcaacgaagcatttgaaatcatcaagaaggaaaagggacaggtcgttggaagcatcattgctttggatagacaggaagtcgtagacttagaatccaaggaccgtttgagtgccactgctgctgttagtcaaaggtataacatcccagtcttaaatatcgtgtcgttatctcatgttatgagctatttggagactagaatgggttctgaagaaaaaaataaaatccaggaatatcttcaagtttacggtgcttgaatataacctccccctgtccttcctcccccattcctaagaaaaaataaataaaaaaaagaaaaaaaaaatttttttccatggcacaattatatatacatctctcttatctatccatcgattcatcaatcgatcaatgtatcaatcaattaatccatatatatatatatatctgcttctacttctacctatatagaaatatattatgttaaaatgtaaattgttaactatttagttttttcattcatatacatattcatatatgtatgtgtattgaataagaatgaccaactatacacctatcttacattttttgtttctttttttttaaaaaattggtgttcaaatgtacacacacacatacatatatagatttacaaaatctacttactaccttctaataactttatatctattctttggcatcttcataaccttttctggattagatgaggtaacttgtaatggaggtggcatctcatataatgtctttgtagcagggtgtcccattaacaatggactatgcaaaggaacaatgtcgttcatcttaaaacccctcacttttggaatcttttgaatcttaatattatcataatctggtccatatggaatctcccttaatgatgcaagtgtggttggattttcttgtaagtaattagcaatatctttgaataatagccttttaccacctttctcataacgtgattccccacccccaagcgaattcggtagaactttaccgttttctttcagaaatacacgcaccctacctgggttaccgaagtcttgcggatgtgttttatcactttcaaagatggacactaaacccaaactacgaactgcatcagatatggttttagccaatggattctctacagctaagtctaatggaactcttctaccttctttatgtgatctattcttatcaaaataacatggataaattagttgaaatctcttaacttgtcttaaatcttcctttgatataggtgcagattcctcaatttttcccgtcacaggattaataaatgtaacctgttctttgtccctgtttcttattgcttcttctcttcttttcaattctgcttcctctatatcttgacttctaaccactgttggtgttatctttggcgcaattggcgtcttcaaagaggaatcaaactccgcaatatccatctccaaattatcaatgtcttcatagtcctcaatttcttctagtgttggcatttttcttcacgttcaaataatgcttttatattattactcttgcttttttttctctttttttttttatttgtttttttttgttaatatccaaaaaaaaaagttcttattttatccttaaccttctgtctgtttcgacttaggctttaatgtttaactttgagcaaaaagtgttaaatttttatttcatttgccatactacgccattgcaatatcatgttcatctttaattttttgttttgttctacaattatttttttacttttacttatacttttatttttttttttcaacaacaaccaggagcgaaatttcatatctatagttttttttcaaatttaccctaacaaactattcagggtctttttaccaaaaacataacaatagctgtagaaatcctactgttctatacaaaattatacatgcattctcctttccccttctcttatttactaatgattatattattgcatgttaaaaagctaagcaatattgccaaaacattatatagagaaaaaatatgacatatatctataattaaaacgatctaaatcacaatgtaaaataatgattaaattacacatttacttaaagtccattttatagttatccatatctatatctgtacgacagaatcccagaaataaaatgaatttaagtactgatccttacttttttctttatatccttgtatttttcttaatactactactacctactactactattgttaatgaacttaatgctcagctgtgtttttgaaaaacacgtcatctaatataatatcaatgacttctaataataaagatgcatttaaacaacgtacctgcaccaaatcatgtatcctagatgcagcatcctgtgcatgtctacgaccaacaactttaccacacacttcagtaaataacatacttaacaataatctggagtcctttcttgtttgttttctttcagaggtggttctttcagctttctcttttgttttctttcttctttccattaatcctccttccccccatagtgattgtttaacaacgatcaaatactcataaacattctctggtgattgtaacttgactatactatctttgatatatttttcaatagtacctccaagtaattgttgtaatactagaatgatagccccgcctctcaaccataataaatttgctttatttaaagaaaataaggatataaataaatcacatacaggttttagtaaagatacattcgacgcagtacctcgttgaattaatcttacaccattgttaatttcattttctcttatttgatcatctattttgttatctgtaccgttaattaataatgatccacttgtaacattactattgtcatcactcaattgtgatgatgtttctgataatggactattctccaaataattgagtttattgtcaatatataattgatcatgtttatcactaataccgttattattgaatagagttgaattcttcaatgtatggatatgaaaactaagagattcagttaaaaaccttcgaaacaaatcatcttgacatatttcaggataatctaataaattatttaaatataattcaaacctagcacgcctatcctcgtaaagttcctttaaagataattgaaaaccccatttcatattcctttttggtggaaataattttccaatagactcctgagagagaattgtagaatatctttgtttcaaatatttatgcaaggtataaaattcactatagcgcctgggtatctcccaagatgtgacttgctctttataaacatgatcaacattgataacataaaaaacaacatttcgtatactactaatctgtgaattttcgtaataacaattaatatgagttgtagtgtttttatataaactattggcattttcttggattgatagttgttgcattaaaagttccttcttttcaaggtcccgaagtaatgatctctgtgatttatctaataatttcaactgttttttattatccattagatcagcttttaatataaggtgctttaacagatctaactcctttttaatttcctcaatgcctaaacttagctggaacatttcgttttttaaagtagaaaaattataacaattatcattcattgtatcactaatatatctcgatgccattgaatctgtggatttatttagggattcattatattcttggtatggtctactttttattccaaaattaagcatatgttgattatctaaaattgtattaatcatattagatggtgccatgttagaagccgaaccaggctgcttatcctctacaaaatcttttaacgagtcactattttttatatcaaagttatcactatcactgataatttcttcaagttcttcagtaagatttggatctgcaaacatcatcacagtatttgtggaacagtcaataactgaattgtgtttacttttcttcaatagagattctggcttaggagaaaaatacaccgagtacacttgtgttgaaatgaattctggagaagttatcattttcatcatgatattcgattttttaaataaaacaaaatatttttcagatagtatcttctgtgcttgttcttgcagtagaaaaagactctttcttgctaagagaaacacctcacttttttgcaattgttcattttctatgaataattcaatgtttttaactaatcctttatccagtgccaacattacttcaaaattactatctgaaaaaaattgggtttttatattatataaatgagatgattcagctttggaaaatttaactatgatctcttgtgagtcaatttcttccagtggaattttaagtgaattaactgatatccaaaaatctaaatatattacagcaattttgtaattattcgtgtataaataccttctgaagaaagatatacatgttttatcagtaagaaaaacactgtcaagtgttatgtctgatataaaatcttcgagttccttcaaaatatctttatctaattctctatgggagggaatcgacatttttggttcgatatattttagttttgtatccaacatattcaatgaaattagaattctttttttcaaagtcacttcttctctagatgtttttctttctgcatctgagggggaatccctgttttctaattttaaaagtttaatagctaatgcaaatttagtactacgtaaatcactgtatgtatgtaataggttaagttgtcttagaaatgcttcaaattctttagttgtagtaccaaaatccaaatccaaatcaattgaacaatcatttattctagagacatcttcataatcatttaacttttgtggttctttaattcccttcattaatattcttcttactttatgaatttggtttctttctcttaagactttcttcgataaattaacaaatgccaagttccagtcatcaggatcactaaatttcataactaatggtgtaaatatattagcagttagaatctccctcatcaggatagaaacaaagggtgattctaattcttccggagatactaaataaggaagcaattgtaaaatgatttttttcaaatgaattgcaactcctctttccaaaatatctggattttcgtcaattgcaaaatgtaatgttttaaatttcttatactcttcaataagacttgactctgatattgacaattttgtatgatttttgttaaccagtctttcaattaggtttcttttggccttaataaaagaattaaaatgcaatgttaataaaggtatcaattttgacaatattaatgtaacaaaatcgcaatcttttaatttacgagtagcattgtctactgcttttaaaagtattttgttcaattctttagggaaccttgaatcaggtgtttggtcaattctttcaaaccatatcatcacataatctctaataatgagatatataatctctcgtaattcatttgaaatttcagaattagtatcaaatatatactctgatttatctgaatcaacagtgatccctttagggtattgatttatatctagaagcttaggtaaatatagttttctatcttcaaacgtgatacatattatctgataaccaacatacccgcacactaataagaaacaagtcttcaacaaagcaaatattcccttacaaatagtgatatatattaataatatagatatcccataaagtaatttagtttttttggtcatatcattacattcaattaattttgattttttggctacataaaattcttaaatctaaaatacctacatatatctgaaatggatgttaataaatccaaggtacccttcagagatttaataatacgctaggctaggctacacatatagtagataacaaaaggatccaagcctgatagggtttgtactataagtgctttcccacacagcatatcaatttagaattaacctatcttcatttttttttaacagtataatttcttaacatcttttttctaccggttcgaagaaatattaaacgagacaaaatattacaaatatacgagatgttttagtatactaacctaaagcaaacatcaaaaaaatatatctaaattcattagaattcaagttaaattagcttacacaaagatcctacatttctatttacataatctatacttttctcttatttttacgaaattatatacttcacttcaaatagaggtcattgaattatagatctgttaccagggcttgttgaagttccttgatatcattgttgatctcattaaccaattgttcacgaagtaaaggattgtttaatttttcattttcttcaattgtcattgctactatccttgaattgagatatttaggatgagttaaaagattacccaacgtatcatataaatcagatctttcgtattcttcatccaacccataaattagtccaagtgaatcatcctcagtttgcttagtatcatcataattgtttttcagatattcttggtaatttaatgtatctaacatcttttgaagcatgatcaattgtgaagtttctctaatcaatgctgtggatattgccaacttgctattagtccaacttgcaatcgaacattgtacttgtttatcaaaatattttaagaaaacacatgtttcagcgaggacagattttccaaatagacttagtaaaagcaatattattgataatagtccattactccaaatgtcatgtaatactaaattatattctggtctaatgttacccttttgtattatcacagagagaggactttccaaaagagtaacaaatagaccattacaaataaattggtctgcaatttcaggaattgtgcataattcagatattgcatttaatgccaggctacctgacacattttgaaaattattttgtaataaatgagcattcgaatataggttcaatataacttgtattgtaccactttcacacaaagatgaagctaaaattttattaaaattttcagaaggattgaatgatctaattacgatgaataaccgcattaacagtgatatgtcctgaaccctttcttcaatcataaacatggccatctctttttgagattttaatggattggaaatatctgctaacattttatgcaaaattaaatagatacctttagaaaaggccaattcaaaaaattccaataactgatctgacgccaactcgagaaattttgcagaatctttaaccaaactcaaaacaatcaaaacgcaacgaataactgttcgatattcatttttccttagacatgtcatgattttttcaaaataattaacctcacttgatttaaatgtagtaattaatagtttaagcatttcaaataatttttctacggagacgtcacttcctgatttttggcagaaatacaaaatataaaacactaattcaaccctctcatgatataattgtgaataactgtctttactagatgttatttgactattcatttctaagaaatggataataatatcaataaaatgtgcattgggagcaccattaattttaatataagatgtaataaatgcaccccaagacttagctccagagattttataatgattgtattgaatattggatgctaccaatttaactttgtgaaagaatccagactcctttatggaaccataccaacgtgcatcatccttaaaccacttattcattaattccaggttaaaaacagagttctcaactccaccaatagataatgaaaactgagtcatcctaaatttattcaatgtataggatggatatgtggaattaaattcatttacatagttttcctgaatgtcattattatcccccgcattatcgaaatatggtttaattttggtaaataagtttttatcatccaataatttatagaccgcagaagttttctgaggacaaatgtaaagatataatgcaaaaatttcaataatttttgagactgctctgtactgttcagtaataaattgtatatcatcttgatctatatcattaagattttttgggacaaatgaattgaatttattcaacagcacatcaagaaattttgaatcattagttaaatttttagaatgtatccaggaatttaatgcatatgaaatacaatccaacaaagcacataatacaccttctggatatttatttatgctcataatattactctttaatatattgataatagatttgtcagaatttatatttatggtattatcaccatttgcatctttctcattatgacgtgcccttgttataatatcaccggttaaaaataagacagttaacccatcttgcttactttgcaataaagacccaataaaattataaatatctttcaataaattaaagtcatttatagatgatttcagatcattcgatacattttgaaacatatcctttgctgcagtttctcctaaatatgaaagtaaaaatgggtagctatcactccacgatatgctaaccaaagtaataaataatttaataatggaattctttaataaaatattattaatataacgttgaactaatatcgaaattgaatcaaatatattatgttcaagaacacttggtggtaatttcaaaaaacttctaatagataccagtaaatttgtaaatttaaaagctgaaattatcaaatccttatagtcttcatcaaaagtattattcccataaatagagtattctaaatctgtgtatgaagttaaaatagataataaagttttcgtagtgtaagaatcagtgctttgattttcaagaaaaaatgccactattgtttcacttgcctgagaaagaattcttgtgattttctccttggtattacaggttgggtcaataccatacacattgtacaggaccttgctgaaaaaattagtcaaatttagacacaatttaaatttatcattcagattattgaactcccaaaattgacaattttcgaaaacatgtataaaatggacagtaaatttttgtaaaagttctttctttgttctttctgatgtcgtactatccctggtaaaagtgtgttcaactaataaattgattaatacagataattgaattgtaaagtcaaacttaccattcggaagttctaaagtacccagaattgtacttattagtcctgttttaccatatttttccaacagagtagaacgaattaaatatgaccataccaaatttggataatatcctgtcaacagattagtaaatttagaacactcaaccaaaacattatagtctcttttgtttaatgcaatctcataaattttaaagataacggatataacattttcattatccaaggtaatctgactggacatactagataatatctcttgactgcggtcatactcaatcacactagaatctatgatagtggaaattaatttgataattgatatcattaattctttggtaacattatccaaattagcaccattattgaaatataaggttgatatattttgtaaaatacggcctagtaaggaccatccactatatttgatagaataaatgattaaatctaagtcaatattaccatcttctatagcaatactaccagactttttttgtctaatattgttctctttaccaatcaatgaagtactatttgctgctgaagttctgctatttgatgataattgtaccaattgacctttagtatcttttggtatagacatcattacattttcttccagttcaaaaggtggcttaacaaacgtttctctcttcataataatcaaatctgatatattggaagacgcagaatcgtgcaaagatacaatggtaccattattaccttgctgattatgtgatatatctccaatcataccaacactgttttcatccagtagatcataatcaatatcattcagcttagcctttgttgcatacgtagttaacatttttaactcaaaattagcaaattcaggtaatgcagtaaccatattaatgaaaggtattaaaccatcttctactagaggtaatttagctcttaaaagagcaaactttctgctaaaagtgtcacttgataaaaattcttcagtgaaatgtgatggcatatataataaaacagtctggatcatttttgttgtttcaatattcaatgggataaaattcattaaaaatgagataaatgaagtcatgatgattggatacgttaaatcggcttttaaagatgtagtgatgtttgtaatctcttcaaaaacgtttaaattttctgctctttgagcaaagaaattaaacatgacatttaagggcacatttggatactctttgttatagtcagaaagaaatattttgtcttctgatgagagcatgttgtcattttcatctaaagtctctaataccaccgatttataaaaaagaatacatgcccaagaataagaaattagtgaatttgagggtaaatttttatcaataatattttgtaattggataaattttttagaatcattaaaaaatgaagaattttcaatattaaaagaatgatatgctgtatcaaaacctaggaacagtaaagaattgatattgataagtgaaattaattgcaacagtacggaataaggtatatctggtaagattgagattaaatcaaactgacaaaattgggaccataaatctatattattaaaccaattcaatatagtatcgaaatttaggatttcattagcatttaaaattaggtcggttatcaattttaaaagcttagagagatagaccaaatcattcatatttttcaaatgaaccaaatccaagaatgaatccgattcaccagaagaaatttgggaattctgattaacttttttggaagtcatcactaccgattgaattgagtcgattaagttgttaagcagttttagtctagtattaggattctctagaatccatttattccaatctggatttaaatcaggtgtatcgatcagagtggcgataatatcaacagctgctattctttcattcagcacagtttgcaaattcggttcagcaaaagataaaactttacatatataattataattcaaagaaaggcgtttagaccattgtaaagccagtttatgttgatcttcagtaattgtataggtggtaccatcaataagtagatctggattaaattttatctcagttgtgctatttgtatcccattttagcagatcacagatcgattctttatctttaaataattggttattgatttgttttaaagtgtcctgatacaacaatttatctttacttttgtcatcaagttgaatataattttgtaaaaaatgattaattttattaaataaaaagttcccatcaagatgtgaactcattgttttttgtgatgtcttcttcaagtacctatagaatctctgttctattttatatctctgtataaggaaacacttttgcttccttcggtataaatgataaacttcctttcaatctcgcgtactaaatgtagctagataatataaaggtacacttacaataaatactttactagttactccaaaattgcaaaaccaaacctcttctatcgagtatcaaacaagttactttcgaaaactcagattttttattttttattttgatatttttggtatttgtgtttgttctccgcactcgagaaaaaaaaagaagaaaaaaagaaaaaaaaaaaactaacaatatatagcacccaacagtagaggtatgggtgttatgtttttatagacacgattccaccaacaaacttatcagtagcagaacagttgccaaagtccagcaacatctgtttattacatacatgcataccgacacacatatattatctaatgagaattatcctatttttgtaacaacaagaaggatgaaatgtgtatagatgggaccccaccctatatatgactataattattctgtgaaatacatctctcacaatataatcaatcaataagggacaattgatggagaataggagaagaacaaagacacaatttcttattcttacccctcccaacactatactgatgctttactatcagcacaactacggctccaatagatatagtattctccacgaagaagaaatgagtccatcgggaatttgacatgtgtgctagttttctgatactgtgtatgtgtattattatttcctaagccgtcgcctgacgacttggtcttctttcaaccgaacaagaaagaagaatacaaaattaaaaaaagaggaaagaaaaaaggaaagcagtatggaagcaaatcatttgagaacacatcagcactaacacactaacgaaagacgatacgacatatgcaaaaaacatccaggcatacatctgcccgggtatgtatacacacacacatatatatatatatgtatgtgtgtgtgtttgtacagatgtccgcacataatatgtaggtgagatcgaccagctacgtgtggacacccaagaagaaagctcctagtgtgagaaaataaaccacgcaagcgaaggggacgaaaaacccaacaggcgggagagggatttcgggaaacacaagagaaaaccagaccagatttcttgtcccatatatataggcgtcactgcacatcgttttatgtgacacgcacacaccgcccatctgctcacccgctgcattcataataaaatttctggtagaaaaaagaaaaagaggaagcaaagagggtaaccctggaaagtttgattagggcttaaaaagaatatttcaggtgtttctttcttttctttccttttcttttcttttcattattttttttttttggattgttctgacagaatctgctatcctttgaataatagaaagctcgactaacagtgtaataaatattggaaaaaaaaaaaataattaggagctatcaattaagcctttcgagtgctggaacacttccctgtcacaaatatgttcgtcttaactgtactgctttgtggattgtaaggtattaccaagaagataaattattaaaaaggatggaagcatctaatttgcagatatattggcacgaatcccagcctgtttacagtctatgtttcccaccgtcgtctaaatatgatccgcaattgcccaaattgtttacttctggaggtgacaacaaggttagaatctggaatttaaacacaataaagagtactgcaaatgagtcatgttttaagatcgacactattgacttcttgacctctttacagcagcatgaacaagccatcaatgtcattagattcaattcaaagggcgatatcttagcttccgccggtgatgatggacaaatcctcttatggaaaagaaatttagacggacagtcaactggagggactccattcgaatttaccactgacgaagaaaatgaaaatgaaaataataataaagataaaaataaagataaagataaccacagcaacaacaacaaccatgttgacggaaagtctataaaagaagagaataaagaatcctggtacgtctggaaacgattaagatttcattctcatgcccctgagatttatgatctagtttggtctccatgtgataattatatactttgtggatgtatggataattttattagagtattccaaatacatactaacagcaacaaggacgacgataatgatgatcctagatgtattttttctttaaaagaacataaccattatgttcaaggtgtcacatgggatccacaaaataaatatatcttatcacaatctactgataggtccatcaatgtatataaattaatatttgatcatgaaaataaacaattactagatatccaattgcagaacaggataatcaaattggataaatcttatatgttccataatgagacgttgccttcatttttcagaagattgactatatccccatgtgggaatttaattttagtaccaactggtatatctaaaaataataatgatataacttcttctttaacaaccaatactagtattatcaccaccgccaccactaacaacaacaacaacaacaataataataataatagcacagagggtgccaattgtgtttatatctttgcaagatcaactttaaaagataatttaaataaaccaataatgaaaatttcaaatttgaaaaaacctgctttaataatatcttttaatccaaatttttataaaatagaatcaacaaccagaagtgagtttatttcattaccgtataaattaatttttgctattgccacatcaaatgaaattcttatatatgatacaataaaggtcgaaccattggctataataggtaatttacactatacgccaataaccgatcttacatggtcaccagatggtaaatttttgatgatctcttcaacagatgggttttgttcatatatatccatagatgctaacaatttatttggtcaacgattaaagaatgatgaaattatgaaatttaaaaatgtaccatctgtttctgtaccaaatgatgttacaattgaaaataaaccaaaacataatattattaatattctaccagtgaaaaaaaaaattaaacccaataataaacaaacaaatccgacgacataatcctctctacactggataacaaaatcatgatttcttatatatatatgtatgtatgtataaagaaactttattattttattccatttgaagataatacataatttctactatttatcaaatacaaccatgaagcaaatcatcatactagtaaatattcaggaatatacttatttacttatttatttatttatttatctaatagttagttatatacttattagtcgtcaattccatcattcttctttattattctttttatcatcatcatctccttcatgtatttgattctcttcaggaggaaatgggaattctttcccagttaagaaatcgtcaacagtggcctcaatagaccctgtatttcttaaggaatattcgatttgtttaacatcaagagtcggtgccaaagtttgaacaatctcaatcatatctacagtgacttctcttttgactctttttactactgggctctccatttgttcctgtattaaagtgctactgttattatcattagaactatgatcattactatattcttcttttttcacaccgttgctagtatctaccacaccatcttttttttcttcggaaataacctctgtattttcctggtatctaacacctcttattaaaggattgttaacacctttattaagctgtctttgatttcttgcccataagaaagttaaaaacaaaaatacaaaaaacagtaaagtagaattatccatgaggtgagcaaacgattatattaagttgtatataaagtatttgtatctaatttttttttgttcttgcttacagtgaaaatatcgttgaacagctagctaactagataacaaaaatagcatttctgttattccatatcaatgatagtgttgaaccaacaatactgattaaattactacatccacactgtcatctccactccatcgtttcctatcttatagtccgattaattttagttttttattttttgattggaagtaaagaactgccgtaaagaatcgaacacaggcgcaagataccagaagaaaattttttcattttcttttttttttccctatttccgacttttctccattgccagacacatcacacatccagacacccgctctatgtctccctcaatttgatctcctttccttttttcttttaatttttcctgctggtgtctgggtgtgcttctctacaacagcagcgacggcaaatccgagggacaaaaaatgaaaaaaaaaaggaaaaagaaaaacggaaaaaagagtgagatcaaattgagaagaaaaaaaaacaaaaaaagaacaaaggggtggggataaaggggaaagagtgaaaataataacaataacaacaacaatagggggggaagcgctggagaaagagggaggtccactgaaatttgcttgcgaagtttctttaagatctgaaactagaagtgcttgaagttttatacaaatcttggtaaggggtaggatttataaacatataactactgaatggtttacagtatctttccgtctaaatacctgttaaaaaagttaacttaagaagactacccacatacacatacacacgcatctgtttacgtacatacatacatagatacatacatatatatatatacgtataggttatgacaattattgtggcttctttatttttgccatatcagccggaattcaaattaaatgaatccgaatatgagactgctgaattggtagaatctaatttagttaagcttaaccctggtgcaatagataatatcaagggaaaaaggtctgcctcagtgcattctcctacacctttcattaacagaagcaataggtccagttctgtccattctactaaacctttcattacaaaccagcataacgataactctttagcaccagacaataacaaaccaaatacttctcgcgagacttctgctgttatcgaaaataatgaaatagatgtcacttcagagcaatttttagaaaatttaactactaatttcaataggtcttctgtttctggtgcgactaaccgtgtcagttccccaattctaggtaaatctcccccggccaacactacatctatcgaggatttcttcttatctaaaaatactatcaatccaaactctactccaattgtttctactgctacgagtaccaccgctacccctagtactaccactgccactaccaccaccaatatggatggaacctctgctaccagccctagaactgctgctaacaattggtcacaccatcctataaacgactctttcactttacacactgtgttcgatactgttacccaacaaacctcaataccaataggttctaaaactactgttgtcagacctaaatccagagctgtgcctgatttcaattcttctatgtacgacatagatagaattaaacaaaaggaacaacagtttcatagtgccccagctatgaaaagagtccatgtagttccagagaaaccagcaatagacagccctgctaatattgaagaaaaacaagaagggggtcaaaaggatgacgattatacctctgatttagagactgatggcaaggaaaaatttgtggttccgaaatttggtgggtactcaaataaatcaaaggccaagagtcttagattacataattctcaaaaattgtttggtcaattgccttggtctattgttccctgtgagaaaggtaacggcgctttaaaaaatgctgttaatattgcatctaaggaaaaaaccttaactgatgatgtctactgggttggtacaatgggtatccccaccgatgaactccctatagacatttcaaataaaattattaaggctttaaaaaacaattataattgccatgcagtaattagcgatgatgttacattcaaaggcgcctacaaaaatttctgtaagcaaattttatggccaactttacactatcaaatcccagataatccaaactctaaagcatttgaagatcattcatggaattattactgtgatctaaacaaattgtttgcagaaaagatagctcaagtgtataaggaaggtgatattatttggattcacgattatcatttgatgttggtcccagaaatggttagaagtttattgcctaatgcaaagattggctatttccttcacgtttccttcccaagtagtgaagtgtttagatgttttgctcacagagaaaagatgttaaaaggtatacttggtgctaactcagttggcttccaaaccactgaatacgcaagacatttcttacaaacaactaatagattgttaatggctgatgtctccaatgatgaattgaaatatcaaggaaaaatcatctccattacatctatacctgtaggcatcgatgcctttgcactaaaggaccatttaagaagagaccaagttaatcaatggcgtcgtttgattagagaaagatggaaaggcaagaaattgattgtctgtagagatcaatttgatagaatccgtggtttaaacaaaaaaatgttagcatatgaaagatttctaagagagaatccaaaatacattgataaagttgttttggtacagatttgtctaggcaaatcacagaatgaggacttcgaacggcagttgatgttaactgttgatcgaatcaattctttatctgctaatattggtatgtctccaccagtagtctttttacatcaaggtttagaatacccacaatatctagccttaaattgcgaagcagatttatttatggtcaacacatttagagaaggtatgaatctaacatgtcatgaattcattatttcatctgaagagaaaaatgccccgttgctattatctgaattcacaggaagcgcatcagttttagatgaaggttccatattaattaatccatgggacattagacatgtatctcaatcaattaaggctgggttggaaatgacttatgctgaaaagaggaagcattggaagagtttagtcaaaagtgttattatgcatgattccgacacttggattaaatcttctttacaagacataaataattcatgggagactaataaagaaagatccactatttttaaccttggttatgatgcattatacaaagactatgaagattcaaagaaaaaattatttatcttcaaaattactgaaccacctacaagcagagttttgtctacattaagcgaattagcagccaacaatattgtctttgtcatgaattctcattcaaaagttaccttagaacgtttatacgctcgtgcatctaatgtaggtctaattgcagaaaatggggcgtatgtaagattagatggatcgtggtataatattgtagagcaagtcgattggaaagatgaagttatgaagattttggatgctaagatcgaaagattaccaggtgcctattataaagtaacagattctatgatcagattccatacggaaaatgctgaagaccaagatcgtgtagctggtgttattggtgaagccatctcccatatcaatacattatttgatgaaaacaatatacatgcatatgtttataaagatattttgtttgttcaacaaaatggcttatcattatctgcattcaaattcttgttgaactacttcaacagttcggctgcacgagccagcggagattcgcaatgccacatccaatttgcttgtatctcaggttcttcttctccaattattgaaccattgttcaaatgtgttaaagaagaagttcttaatggcaatttaaaatatggccacacaattgtgtatggtaacaccacatcaaccaatgccaaggaacatgttgatggtctgaatgaattattaacaatacttgaaaaagtgtctcagaagtaaaatgcagtaagtaacaaaacattttaatccttaaataatgatactatattcttaccttctttctctcccatctcctacatttatgtatataatttttacattaatgtttttctatttatgtgtaactataatgatggtaaaatgtacagtatatacagtatattatttccattattttatatgtttatgttaacttattctttgcaagatacggtatttgcagtttaatccgttattgcttttttgtttatactcaataaaatatgaaaaatgaaaggaaaaaaaggaatatagtaaaaggatcgataattaggatgtcatctgagtagaagttagaagagcttagataggagatagcatgtacacaagcaatataagtaattgagtatacctctgttaaatatatatcaattgaataactatatatcaaaataaaatgaatcaggtagaaaatttaattcaatccctaagcaaaaaaaaaaacaaaaagattgttgaaaattttctatcatccttacaatgccatatatgtcatgaacttattaatgtgccaatgatgcttacatgtggacacatttattgttatatgtgtttgaaaaattggttcaagactaatgagacaagaagattaggttgtccagactgtagaaaagtagctgaagttgtacctatattcaatgcatttttagataaccaattaaaattcatattggatttgataataaatgataatcaatctaagagttctgaatggggaaagctattattagaaagaaaagaagatgaaactgtctataagaatgatatagcaaaggacacaattttcgctaatgtttttaaaaattctacattagctataatagatatggatgatgatggtatcccacgatgtggaaattgtcattgggaattggatccagatgatatggacgatgacgagggggagaatttatgcccacactgtcattatagaattagaaatgacgttatcactggagggaactcagaaaatgttatgagcaactctgccaggaacattacaaataatttaagaggacatgaagatgaatacagcgaaggggaatatgaagaaatcattgatgaaatacgaagatttagtgattcagatttagaagatgacagtgatgaggaagaagaaaacggtaaaacaaatgatagaggaataagaaaaagaaaaaggaaagatataggagaactatatgatgatgaagctatagatgaagattataatagtagtaatgaacaaaaaaaggacaaaaaaaaaaaaaaaaaagaagaagaagaagaagaagaagaagaagagcatgattctgatctagattcatttgttgcaagtgacgatgaattaagtgaagctgaagagtctaaatctaacagaaagagaagacactcaaaattcattgaagataagagctcagaggatagtaaaagagaatattctagtgactataatagtgatttctatgaacataatgatggggatgggtttgtaagtggtgacagcttagatgatggtaacagcattgagtcaaattctgatgatcatcataccctcagtagcgataatgaggagtttgttagctccagaaaaagactaaggaaagcacaagtaatgacaagcgatgaagaataatgcttatgtacttctatatatacatatatatgtatacatgcatctaatatcatttttgttccaattaactttaagtctggtaaactattaaataatcatactcctctatattattgtcgtggcagttttatctctatgcaaaataacatatgtccatacatatatctacaaagttgatagcgacacaatagggtacgccagtatttccttataaatagagaaccaaaaaaaaaaaaaggttctaagctgaaagtcgtaaaataagtccagaagattcactaaagaaaaagcagtcaatagtagaatgattctttactaaaatatatcgcagcaatatcattaataacaagctttcaactcccagtaaattttaaatagttactaatataaaccaactctagtataaagactattgtgctaacaattttacaaacaagagcgagacaaaattgaaaaaaaaaaaaaaaggaaaacagaatcatgttgaaccaagtatcacatcaattctattattctccatctttgctaaattttagaattacagttaaaaagaatatatatactacgatatcaaaaagctacctttgttgtaatcatagatggcttagaacaatctcaaccacaacacgaagaaaaattcctatttcatttaaaagtgatcccaattccaaaataatatataatgacaacaatattaaccacaataaatcaaacttgactaataattattcacctgtagatagcacccattttttcaccaacccaaacagagacgaaccatcttccaaaataaataattttctttcctctactacaaaatataatgataatataccaggtatgagtataggagaggctattaaacagcatcagaataggaaacgtcgatttaccatttggtttacattgtctactttgctaagtttatttattggatacaaaataatatataaagcggtttatttgaaaatggattcttatattccattatttccttgtaataaattccataagctgactcccaaagaagaacagaaattaaatattaataatgtcaaagattttatttatacaaagttaatgagtaaattgacaagtcatgattttattaaagatcattatggtgttccactaagaattccatccacaccgcataaccaagttattaacaatgataacgataaaaataataatagcaataataataataaatttcaaaagtttaacatatggtgtgaagatgaagatttggtcgtatttggcatcttattcaaaccaaacgatgatattagaatagatggtaataataaaaaatggcatctcgtgccaggactatttaaatggaaatttagtcaccaatctgtgaatattatggaaaggatccaagatattttagattttattggtctcaagtacgataaaatcataactccagaagtgacctacgatacatttaaatatgaagttccaattcattttaatggtaatggagacattaacatccatgactctataaataatgatcaccacgcaatgcatatatgtttcaatggtgaattgggcattgatgataaatcagttgttcgttttgaaggaaagtaccatgttgatgtgaaatttgaagaaataagcttaacaagaagggaaaatgatggtaatttagtcaagtacatcctatataacaataatgaaaaataataaaaactaatgtatataaataaagaatactttaaaagatattaatatatatatatatatatatactaaaagaaatataaagaaaggtcaaaaagaagtatatataaactacataaatgtcaaagcacattttaggcacaattttaaattaagaatgctagtgcaccaacgatcattgcaccacctaaaccataagcagcaacattttcctggccatgcaatggcacagcagcattagtgcttgttgttgatgaggtggtagtattactagcagcttgagtgaatccaacgaaagcaacaattgaaataataacagtagaaggtttcattattgaagatataattagaaaagatatttgatagaaagtttttggtcgtataagttctcgttttgaatctttttagagtaatattctttagatattaattatattatatgtataatatatatagcagaaaagattaagtgcatattataacagaattgaaaatgagagtacatttgattggattcttcaaaaaacttttgaatacctcagtatttatatcattcatactaaattaagagtaggtatgaatgtcattagcttaattaaaataaaataatacctggggaggtcacatttcccttgacctttttacttatatgcattctctcccttcgtttataacattgatataacataataatacacataggctattgaaatcaaaagctttattattgttccatatccattcaaagaaacttatttagtagcttgtatcttctccctaagacaattaagtaccttattttttgcaaaacaacagttgataggcaattataataacaaacacagggatataaacaactggaacaatctgccaaagaattgtagtgtagaagaatatcaagtttgaaaagttatcagataaatatccctttattaatatatatattagaccaacccttcaacaatatatgtgcataaaagaggttcctttacggcaagaaaaaatatacatatatgaaaatctaatgaattataataaaaaaaatctcataatcaacaaatatatcaattaaattatttaaacctttatttttttatcttattatgtgctattactttataacaatccgttctttaaggcttctttgtttagcaatctgtcaatatcatttccatatttttgacttctgttattttctttaaatgcatattcaatagtgatgactttatttgctaataattgtttattaagcttatttatcgcttcatctgcatccttgtaatttttataataaataaatgcacaacgaatactattattatgtacatagaaaaattctggacttctatataatggtcctaatttattgaaatatgattgtaacgatttatcatcaatagattcatctaaccccttgacaaataatttagcaacaggtggttccaatttatcattactattaaaagaggatatattgcttttattaatgtttttagaatctgtagtataaataattttcttggtattaactgcggatttccttattttaagtaatctatcatataaggaaacagtattatgtaagagtttaataacatattcaacatccttctctgtttcaaattggataaatgcatagccttggtatttttgtaatattttatcctttggatattttatgttaactactggagctacctgaataaatagttcatataattgctctttagttacacgaggatcgatatttccaacatatacacttgtatctatattagagttcataataggtgtatccactattattgtttaggaccaaccgatatggttatttaatgtatattggcaacagcaataatgttttatgtattgctcatattttttatttcgttttctcaaagatgcattctaataaagttgattcaaacaagaatttttcgatagtgtaatgaacatatcacttatagtacgtaattagaaccaaaataaaagcaatgcaaagatagaaagattattatctatatatagattaattagtggaagctgtgactattctttctaggatattattatatatactaaaagtattatattattcttttatctaaaacaaaactatttaataaacagtatttcatatactagcaagtaactgtttccctagaatattccaaaagtactaacagcaccacatactaactttagcaacttatctgtctttttcttttttctatattcctctaaaccgaactttcatctcggctttttaacacttaaacagttcaagaattagaggcataaactttctcaacttgatccctaacctcatctaaaatcttttttctttttaatttttgtgcagatgtaacatagccgttttgtggagtccattcttcaggagcaaatacacaacctgcaatcaactcaatgccaacaagtccttgttcttttgcagtagctaataagtcctgtaaaacagcattttgtaatcttgaatcttgaaaatgatgtccaatttcttcttcatcttccaacttatcattggatgaaatgatatttaatttcttagccaatgcaattaatggcttgtgatttggaacaatgatcccgattggtttaactttagtttgatcagcatatacacaaatattttggacatattggttggatctataaattgattctaatttttccaatgcaatgtattcaccattcaaagtctttactagatttttctttctatcaataactttcaaatgaccatttggttcccactgaccaatatcaccggtcataaaccaaccatccttggtgattgcctttgcagtttcttctgggtttttataatattcagatgtaacacatgcacccttaatccaaatctcaccctgattattcttagcaaaatagcctaattcgtccacgtctaccaattttacagtaacagaaccagttaaatcaccagccacaccaaattcaaagtttgcaggatccaaaatacaagtatttgccacagtctcggttaaaccatatccaatcaatattggacaaatcaagttagttaaaaatctttgggtactttcacttaatggagatccaccatttaaagctactctcaagttcccaccagtagcagctctaatctttttaaagattaaagatgcaattaacccaccaccaggcaagcgaaaacgatctagtccactcttcgtatgataagcaacccagaatatttttctcataggcataggcaattgattaacttgttgtataatacctttctttacagtttcccatactgctgcaacacctaccataatagtaggtttgaaagctactaggtcaccctcacagttgcgtaccgatgttttggtcaatgttttaacgttggcataaccaatacaagaaccccataagatggataataattcgaatgctaattcgaagatgtgtgctaatggtaagaaacaaattaatctatccgttggttgaacgaaacgagacaccggaacatcagcaccaccgacaccagcaataatattagcatgagttaagacaacaccctttggatcaccggtagaacccgaagtgtacatgatacaagacaaatcctgtggttttggcttatggatttcaatggtatcattattgtctttaccaaattgtaaaatttcatcaaacgaataaaatctgatatctggacgtagttttaatatttcttcctttgcttcattggcagacttaaagatcttaccattttgtctcttatcatttggattaataatttctgaatggatcacatattttatattcaaacatgtcttcaatggttctattaaagttggtaaaagcgcattatcagtgaaaattgcagaagattcggtttgttgaatggaatgaatcaacccttttgcacctaacgtatcgtaagcagtgacaattggaatattttgagattgggaacccaaatacatttgcatccatttatgagaagtagaagcatagatatgcaacttatcattactggcaggagtcaatccgatgtgaactaaacccttccctaaatagatcatattttgttctagttgagagaatttaatatattgataaggagtcaattcataatataaccaagtcttttcgacatcttgttttttaccattgatagttttagtaacggtctttgtttcttcatggatatcagttatatttctccagcccatgcaattattattcttgtaacgtttgcaacattctgtaaccagttcaaaaaccgaatcacactggatgtctcttggagttgttactggtgctttggcagatcgttggtttcttcttggagcagtttcatgctcattttctgggtcaccaactataacgttatactgatatggagccatggtgtattaatatgaaaataaatatatatatatgtatgtatgtatgcacgtatgtaggtgtgtatacttgtattaatagatgattgagcatgcaacgaaatgtctaaagcagatcaatcaaccaattaattgaatgtaaacaactcaacacaacaagctatttatttgacggacctatcaactgccacaaggtttatataaatgcttattgattatcttatttataaaatttaaatagattaattgttaaagcaagcaacttgagaaaaaagtcacaaaatagaagaccaaattacttatttctcttatcattccaacattcatcgattaattgtgtacgtttattatgcaacaaacaatttttcattcaaagtttgaaattttttattttataccttttttttttttcaattttgttcccttatagaaaaagttcaaaatccgttaaactaatgaaaggaaaaaagagacaagcaaaaaacggattagggttaagaaaacagattatgtatttttattttatgctcttatacattgagataggggtttgatgataataccaaaaaatatccgaagatagcgaagttgctaagcgaatcaaaaagtaagaggcgttgtattaactaagtatatttcaagggttacacagtattatccaatttgtgtaaatatctttctggaaagttatagggttgatttctctttttcatatttctaggtgagagggggtaaattattcttgccatgtgaaaattgtggattattctagggtttacacaaaaaagaagagggcttcttttgaggattgaagaagttagtagtagtatgtttcacgaaaaaggaacgatacacccgtaagagaatgttatggattatctttttttttagtcttctagaaatttgacgttttattagttatctttattactaatatttacaaataatcattacataatattggtattataattaattatataatcgttcatacgtttgcttatatatatatatatatatatacattacaacaggtcacatcccatagatgcataaagagaagaaagagagaaagaaaaagaatatgcataatgataaacagacagaaagtatcataataaaggtgttaaagtaaagaaatgaatgtagaaaaaagagagaataaaaaaatatgttatagagaaaaaaaaaacgagtcattaataaaatcaatcaatcaagctggtacattccatctaacagttttgtttgggcgtgtggttggttcttcattgaaatcaatgttaaattcatatccacgaattaaggcatagtcatcttttgtagatatttgttcatcttctgaatcataaatatcaccaaaataagtgcttctcaattttttgtgtttttcttttatcttatgatttacaggaatcgttatacgctcccaaacactttgtatgataggaatattgtaacttgattccttactttttgaagttgatgatgaacaattatatatacgatgagacgttgaagaagatgatgcattgagctcagttgcatatattgtagcatcgtctagagaaccgttaccagaacttactataagatgcaagcttctggaatcatttctgatgattggtttaataggagtcttgctcctatgttgcggtatggataatctaacatccgaatcatttctcttcttagaatttaatgagggtagatttaacataaactcttcttctcttttatctgaatttatactttgtaattcaatcaaggtagaagggataatagtatttggtttatccatagaagagtatctatctctagagctccatggtaaataaggtatggcattaaaatctagaggttttttaggaagatccaggctgggagagcatgaggaaacgtcacttagtgggcttattgtctctaaatcagagataggagattgtgcttctagatctctattcaatcgttcccctaagattccttcaaaactgtctatcattgttcttctgtgacgaagttctgttggaataggtgataatattggaacatgagtattaccagcgtaattaatgttactaatattcccattattttttcgtaccttctttgaaaatgagtttatcttttttccacacttatgtggtttggatggagttaatgttatattattgtcactatgaaaattatgattttttgtctttttgtttggggttgatggtatagttagcgaattaatttcataatttttatgtggcggagtagatattgagacgttacttatgaaagaagaaaatgaaataacggaagtagcagttgtaagagtattcatggctcttccagtataatgttaaaaagcaataatggcttgatctttatgcttttgtagtcgtagtaacgaaagttgtatcagtaatgtacggaattgttatacgctcagtttaattactccgacttttattgtaaatatatagagtgttagtggggtgtcagtaaaaataatattatatatgaaggaaggcaccaaacattattacaacgttcgagaaagatgactttgatttatctattctaagaaaaactgtaaacaataaaaggtaaacaaaaaaaagcgagaaaaaaaaagaaacgaaaaaagaaaacaaaaaaaaaaaaggtggaaagcggaatgaaggcacaggcaatccagttgattacaatagcaagaatcattaagacacaaataatactctttgaattatacaacttttcttacaaaccgttcgtatacttacgtatagcagataacatagtacgtcttaaacactgtggagttttcattattattttggtttttaaagtagagaaggcctcaaaatttacgggtaaagctggataagtagtatgaacataaactttacaaacttcaaatatttattcatgaagttgtagaagcctgattgtcaaattttgttattgatgtctttatatcctgtcatccataagggttgttgttttagtcttttagattcattctcctatctactctactgagtaaaaaaaacagcaaatgagaaaataaaactttcaactaatcttgcgcaaaaagactaaaataagtgttcactttttttcctttgtcattttttttgtatttttttgtacaggtaataagaaaaataggaaacaatatccaaatgcagttcaaaaaaaaataattccaagaaattttagtaaaaattaaaatctagaacgtttttaaaatttcatcaatagaatgttatttatgaatattatcaactccaacaaggaaaataagatggattctttataataaagaattacgtataatatgatataaagggtatattttttttgcacctaactgtttgcagactgttttattttacttaatgtacaattgtttattgtgtctatcaataaatattcttagtaggtacgttatattttttttctattcatagaaatacaagtactagtagaatagaaatattttgaagttcttttgagtacatgtctttggtttaatgttttaaaaaagatgttcagaatgttagtcttatttatagaatattacctttggtcatttaaaactcaaaaatgatttattttgaaacttcattagattactattttgggtaaaaattttcaaatagttagatttgttttcctccctagctacgtacgaaccttgaggaaagtaatttgaccaatatcaggctttttgcgttttgaaataagagaaaaatacgattagctaaatatgtagtgtttaactagatcttaagtacacttattgaataattatataacataaagaaaggccgtcacatttgatatattaatggtaatattaggtatttgacaatgtatacagaaaactatagcaagagaagaacaaaaataacatagcttgttaaattatgtttacaattttattcttgaattacaaagtatttaaatattgattcaattgatgataatttactcttaggtatcttacaactaataacaaattttataaatctttttaaagaaactgagaatttttacaatgaatcaattgatatatttgaactaactaatgttgaaaagtttgtcaaatagtggaaccaactataacacaatgaagttagtgaaagcaattacctgttatgcaaaatatcaatgaaattaaattggttatgttcaatcttactgaaaaataaaaggacttataacacatgctttagtgattccaaaagatgaattcaattgtaaaaatttattaaatgatattcaagaattattgatagtcagtaaggtatgtagaaatggagcaactagcacatggcaatacaaagaccctacttttggaattagagaatgactctccagactggattcgatatcaaaaataaaacgagaaaatagcagaaaaaaaatacgtgaaaattgttggtgatataaaccgaactactttatttgtacagtggttgttattatgaaaggtattgtagagatgtttatttattggttatgatataatataaaaaaaatttctttgtttatttttgtcgaatttagaaaatttttgttaattttcaatttctatacacttattcccgagcttattgtcaacttgcaggaaaacaataatctcataataagaattcagtcattacagcaaatccatgttgtttctgaaattcaaatattatttgattttataattatatttcgggtgatttcttcatttggaaatttttttcaacatatcgcttttttttttcttctcacacaaaaatggcaaatttaacttttttttttgatatattactctattgtttattcatttgtgacaattgtgaaaaataaactttttttgtttactcaataatcaaattaggaaacatgctgtaacattttttcttgtgtttgttttgtgatatcctttttacgtaaaataagatcaaattttattaatttgacttttataatagcataatatttattattgttgttgttctttcatttcctgttttgttaatgtgcaggaactttaactggtaacattctttttcaaattaaatttgaaactactaaactgaaaacgaagaaagtgtctagttcttaactctactttactagatctagaagttgagttttataatctgaatacaataacttattagaggtcatgcttctaacaaaagtgacaaatgtaactaagtattagttagaactactttgggttaccgtagttagcaaagtgtcttatgggaacagaacttttagtatcattcatctctgacagaagaataattagtaaaaatatgatagtatttggtagtaatctctttttttaaggaatgtgacgtctaaaagttttgagacattgatttttggtaattcaaagtaatttttaatctaattgcttattccatttcatttctaaagattgtatgatcagtaatattagttcaacatttcgtgttggatttccgatgggtcttgccacgtaattattattcaataaacattttcaatggcttgttttaaggtttttttatcgctcgaaaaggaaatataaaccgatcaattaatttagagtattctataaaaagtgagtaagaagacaataattttttcttctttaagtaaaaggaatgaacctcactgatacaatgtagatttatcactgccatagttatcaagaaaacagagattggaattaaagcaaaaaaaataaaaaataaaacagaataaggaatgtcaactctaagttgatattgtctatatcaattttattttccgatcctgtataacaaaggtttcgaaaatgaaaggaaaaaaaacgtgttatataaatatagatcaaattattgtttcaggtggttggtttttaaattgggtacacatattgtaattaatatatcaaaaaggtttgtaagaagatttcatattttagaaaagataaataggcaattggaatctttcacttcagttgcaatgtaaaacttgttgtttacaattgtgtaatcaacgattataataattattttttaaatgatgttctaaatttttatttctatagtattcagaattcaactttgttgtaattttaattgatgaaagtctaagattggaaaacgttttttcttataaaaatagttcttcgaatacatttatttttttaacagaaataatatattaaagaataatattaatcatatcgtatgaaattgtgaatacataaattaattgatagttaatgaaaaaatctttatgcttttaaggcaatcaattattttcatataattgagttcttttaaatattgaaattcatattttggtattatgaattttgaagaatgtgttcttttcaaaaaaatcaaaattgtaatatcaatgagtaaattttttttgggaaggtatataatacataggtattctttacttatcattgtatctttttttgaggttattaaacatgatatcacatattttgttaatttcgactttgaaaaaagatgctaattttgattttgccaaaaaagagtaaattagatattttatgatggttacaaaattttcaatgtcttcaaaatattagcgtctatatataaatcttttcagaagtttaaaaaaaaaatgagggaaggaaggaagttgcaaaacaatcttgaataatttcaaaatttttttagaaatatattaaaaatatcttattacattgattatctctttttcatcatttaattggaatattttagataagtatttttaatgtaaaagataaaagcatcaatattattattaaactgaaaattacttacgattgtatatatgtaatgtttgggaaaaagctgttttttgtcatctttcaaaaaacttcttacctaatctttttgtaacgccaaaaacatacatagtgaaatttaaattgtaaaatatgatctcctacataaagatatattgaaatgtaatataaatctatttctttagggaacaaataaaatatttcaagttcgaaaaactattcgatgaatttcaataagtgatttgtagtattattaatatgttcagctggacgatttctttaaattaaatttactttatattctattcaagtagctttgggtaaacctacttaaaagaatataagtttttccaagaatagtaattttttaactttaataattgtataaaaatgataatatatgcctaagtgcatatagaatttttcgatttgttatagaattaatatatgtaatttaaactatataaaaaatattttttgtatgaataaagatattaacagaaatatactgattataaggaatattagcactagtctaattagaaaataaataagcacgttttactaaaacaaaattgatagcaaaatgattttttcttaaattaacgaatatagcaatagcattttggcaaaataaaattcattaaaattggattttatttattgaaaattttgtaaatatttaaaggagtggttcatttcttttatggttcttatcttttaatttcaactccatctatgacggaaaagaataacaaaatgccaaaaatatttcatagaaaatctaaaatgtcaagtttaaataatatagttgagccacaaaaatcagttgaacaatctcaacatgatgtacaggagataaatgagaattactctgctaaattaaacaatatatcaaataataaacaacatagtcaatttagaactatccagtatttgaagagttttccaattgtccaagaaacacaatcacatgcaaataattgtgcagtcacaagagtggttattgcaagtgtagaacctgttttggttaaaataattaattctaaacctataaaaattgtgtctccgattacaaattttgtagataaaattggattttcgtcactaaaattaactgaaaagttaatcccttcaattaaaacgaaaacttttaagaagttgggagatgatatgatgatacctgttaaaaaaaccaaaagcataaccaaaagaataaaatcttcaatggttactaaaacccaaaaatatgtttataaaccaactcactctcaaatcatacattttagaaaatattacaatgaaaaaatttatgatactaaaggaaaacctttagtcagaggtgctttcgatccagtaatattaccattaaataatgcctttgaaaattcaacacataaatattttccagatggtaaagctgtctatggttctttttcatgtgaatttgatagaagtgtggcgttatcttttagactaattcaaaatatcattcccgcattgggatccaagactaaaacgattattttatggcccttagtttatatgcaacatgctaattttgtcttaaacagacacttagatatgcaacccaacctctgtgttagtaacagtggtagagcaacatacggctctattaaagagctgtatcatgaattcataaacaatactaagaagaaaaccccattaaaatattttactaaaagaaattttgaagaaaaagtagatattgccacaactaatcctgttactgtacatgggagtatacctcatacagtaattgaaactacagctagcactgaaaaaccattagtcaacaatataatagaacatgtttattcaccatttgaaacaagttttacaacatagcaagttgaagcagtctattaaaaactgaaattttaagtgtacttatccaactttaaaaaatacatatctttttggtgtttgatttcaaaatatcttttattcagaataataaatatatatctttatttttatacttttttatatattgctatatagttactttaaatcaatattcctttttatttttttttttttgattttctttttacattctctggactgttttacatccgtacatacttctataaattttatttgtttttgtttttttttttttaaatttcaataagttttccggctttgtcaaaaaatcacattaatgtgttaatttcggtagttttttaaacaaaaaaacaaactcattggaaagaatattcgatatcgaaacagttatcctcttgagaagttaacaaatgtttagaaagaagccaaagtatcccagtctcaattccaaactccaacttacacagaaacccgcttggtaacacctcattttttcgtcacaggaaaattctttctaatctgcccgaaccagtttcccaatatggggggaaaaaggaaaataaccatgtcccacctttagtaaacgtattgtagcaaaatgggctttgtggtgtatgaatgaatttaacaaaacgtattgtaccatcttcttattgtgtgccatacattatgggcgtcttgtataaaactggcacctgctggcaccttgaaagttcatactaagacaagcgaagaggaaccagactactgaaaaagtgagtaagaatatgaatagcagataacaggaccgtttgattgagagatagatgatgttacaaaattaattctgtaagattaattataattcatgatttacgtggaataatgtatgcatagatgataatatatgatccatatttccctccataggatgtaaatttggaaaaagatttaaaatcatacaattgtatattttggaaattgagtttggttatattgtccatataaaatgtttatctgaagtgactattaaatggattattttctatttacgagatatgtggtgttaatttagtctaatattatccacaactctctcaggtcttggccacctgttaaagcaagtttttatggtattaggaaaatgcttactaacaaaccaagtttaacattaagtttgtactttgttataactgatgtgttaacaattctattttgcgttttattttttttaaatagtggctaatttaagagaatatcaagttattggtcgtaagttaccaactgaatccgttccagaaccaaagttgttcagaatgagaatctttgctccaaatgaagttgttgccaagtctcgttactggtacttcttacaaaaattacacaaggttaagaaggcctctggtgaaatcgtttctgttaaccaaatcactgaagctcacccaaccaaggtcaagaacttcggtatctgggttagatacgattccagatctggtactcacaacatgtacaaggaagttagagacgtcaccagggttgatgccgtcgaaactttataccaagacatggctgctagacacagagctagatttagatctattcacatcttaaaggtcgctgaaatcgaaaagactgctgatgtcaagagaccttacgtcaaacaattcttgaccaaggacttgaaattcccattaccacacagagtccaaaagtctaccaagactttctcttacaagaagccatctaccttttactgagttcattacaatattcttatatatctatattaatattttcatttaggttaattgtataatttagtaactaggtatcctttaattttaaagtatgaacatatataacattaccaatatttagtgacagatgtcaagatatacaacgattacatcatatgcaaatatatgagttcgtgatatgtaaaggcagataatgtgtggatccactctttgctattatctatgtatatcgaacattctcattttgcccatgtgaaattttataatctttgaaaaagttttcaaaacagagaaaaaatcaaatatgtaatagtatacctcgtttttaataatatagataactacaacttgtatttatttaaatcaaaactgacttatgtaatttttaacttatacaagaagatattattctacttccatttacaacaataatatgctttcagcctatagttgaccagttgctcattactttataaaattcagaagaagacataaattttatctaacgtcgtcatgtcagaagtaaaagatacagttaatagtaagctccatgatgaggatatgtcctccttatcaaaaagaaatatcaaacaaggagcagggaaagttttatcagtgtcaacaacggagaatgttagtgatgaagacgttcatctacctgttacagaaatacatataaagtcacatgaatggtttggtgagtttgttacaagacatgaagtaccacgtaaagttttccactcctcgattggatttattacactatatttatatacacaaggtgtgtattataagaatgtcatcaaaccattggtaatagcttttgtaattatttttgcgttagatgtattaagattacattggcgtttcttcaacgttctttactgccatgttgtaggtccattaatgaggaaaaaggaagtacatacctataatggtgtcttgtggtatcttttgggattaatactttcattcacatttttttcaaaagatgtagctatgatttctttgtgccttctaagttggtccgatactgcagcttccacatttggtagaaaatatggtcatttaacacctaagttaactaaacataagtcattagctggtacactggctgcttttattacaggagtaatcacatgttatatgttttatggcttttttgtgccaacttatggtagtaccaataccaatgggatgataatgtggactactgaaacaagtcgactaactttacatgcattagcatggctagtaggtttagttgctgcgttaagtgaagggattagcatttttaactgggatgataattttacaattcctgttctctcatctatttttcttcactttgtaatttatttgttttatatatgataaacggtttgtatacataacctactgtttattgagtaactatctatttcagatttcttactgtttgaggagaaactttaatatgtttatctttttaccgctttaagaacattctttacatcaaaattgaaatggatcaaaaatactagtagtactattattctcaaaagtagccttcacattgtagacccaacttcaggacaaacctaagtttacagttatcagtcgagaacttacatacaaccataatttcaagaaaataacgaaaattttatcttatataaacatttatacgtatcaaaaaaaaaaaaaaaaaaaatcaaaagaagcttgttaaaaaaatttatgttagtctaacaaaaaagataaactatttatttataactatattttagcttactataatctttgtaatattgattcggaaggtgtatttaatttaagagactctaggtattaatatattatatgttgatactgtcaactacattaatacatgcaaaatatatttgattacttttgttaaaaaaaaaataggataaaaagaattgttttttttaactttgataaaaacacacagagaattttctcaactaatatattaaaaaaatgaagtttaattttatgctgtaatatttattacttatggaatgcatttaagatacattttaaaaagatatatgtaatagacatccatgattggtatgtgtaaaaaaaataatatgaaattatgttaaaagctaaaaagaaaagtaagatcaacataatttcctcttaaatgagattctatactagcactactttacatagttaccattaacaacgaatattcattctattaaatgggattttcttctaaatattcataacttatcattatgttaccaatttcatgtttctaagatttctgtataaatgtctctgattaacggatttaattgagcctaaaatacatacaaaaggagaatatcttcaaagactaatttattttcttcaactcttcttccatatattatttatataaaacatataataaaaacaaacaacaagatctagaataagaagtaagaacatgccttgtataagatgccctaattagaaatcctaaaatacatagttcgtgggtaatgccgaatgtggaggcaaaggacttggaacaagtgaaactgtgagtccagattgtgagtgtattcaaacaaacaatcatcagattaacattgatggcgaaacactaaaaaaaatattttataaacctttgattatttagaaatgatgttagaggtaattttcagctttaacattgatattctatctaataggttccacctagaaaaaaaactacaataataataattattgggaatgagtgcctatagtaattggataaatagtaaacattctcaatattatattaaacagatttagtatacaaaattataataaagttcttcacttttttctctatatacaacatagaaataataatatacaaagattgtaaataagataaaaataatgtatgatgaaatccttggctttatatatgttaacattcaaccattttcctctacgaacagtaagatatttaatgaacaaactcaacaacttttggtgacctctcaacgattattacccaacaatttatcgtttagtgtctgctaaaatcttattgttctatctatttcattatagaatattctatttcaacaataataactaaaactaatatacctaatagttaggattaaccaattatataatttgtaagtgtttatatgtgttggaaaatgtgagttcattactgtcatttccataagaattatttttaattagtctttctgtatattatgtggtgcacgaatgtaccataatttcaggtagacactttgtttttcatcaaatatatttttcacagatttgaaaagaaatgaaaaactttaaaagaagacttgaagtaaatacaagaatttatactgtatacactttataataagtatatacatgtatttagtacacaatgaagaagcatctataacttaatgatttctgtcattaccatggacgctaggagctccaaattccaacaaaaataattcttattgaaatgacagtaataaactctcattagcaaaaagacaatacattgcagtacataatactaatatagcatatataaaacatatcttacaatttcgattgtaattagagtacaatctatccaacgcgattcctgctaagatcgagttctaatagtgtagtggctatcacgttgtcttcacacggcaaaggtcccgagttcgatcctcggttagaacacattttgagtagcaacgtttttgcatcatgcagtatccctgatattactgtttaggttttgtttagaaaaataagggttggcgatatttttctaaactttcctttttgcaaaattttacaaacatagataaaagcaggagtaaccaacataagtacaagagagcaactaagaagcaagcaaggaacaaggaatcaaggattacataagtttagatatatagtatataagtgtatactattaggttatcttagattagggatatagatatatagatatataggaatattacatctagagatatagaaagagtctatatcttatatctatccaagtgaaatattattgagatttgaacaagaattactattatcagaaacacatgatctcagggttattacacatcacttattacggtgagtatgtattataggttttatcagtgtataaggatagacaatttttgatgttgtaatagataataaacctattacgagaggtatactcttctaaacactaaaatagataaatattgcttgatcggttctctatatgtgctatataaactatgctgtacacaagagataaagtaacataaaaatacttatgctgctgtaagcaagagaaacaagaaaaacaagaatatcgtcgtcgacttaagagttccatgatcgtttatagtgatatcaggattccatgtgtcagagatgtaatagtattccagatatcaatatgctaggtctgtaaaataattccttatcatatatccatccaagtaagttatcaatattactatcgtttcttaatcagccactattaaaactttatacactgtagtatcacatgagaagtacaaatattcataaagaacatatttgtgacgtgcgcacatacaatatgtaattgtaattgatgataatattttataagagatagaatcttctaaaatataaaataagataaataaatcttaattattttccaaatatatgatacacaaaaccgtactccatataaagaatagtgtaggaaaatacacctataaacgttaagtttttaaatatgaaaaacatggatattgacatcatttataaagtgaacaaagttgttgacagtaacattaggtgatttatgtcacagaacttctaaatctgtgatattaaaatagtaagttattcaaaaaaaaaaaaaaaacatatcagttctctatgaattagtcaagctaaaagcacagcatctttctatactttaaacaagcatagaaaagccaataatttaactatactgttctaaataatttagttaacataactatttattgcttactatatatttaatcctttttgctattctagtttagttagttaatgtctagttccgttcacttgtaactttaccttgatgatactgtgttgtcttttaacagactctgtctacaaaaatgttttcaaaaaagatagagttgtgaaaatatcagtaattctcgtatttttatacgactaattaaaattgttaataccctaatctaaattatcacacggcaccttgtcgattaagtgataaaagaaactctatagatagatgcatatgtttatattatgaatggtttagtagaatagctgcggtcatctatattttcctctgcacaatatatataacatgttagttaatctagaatgacaattgaacacatctgtttttttaaatgtaagaaaccaaaagattaacactttccaatgtacaaacacatgatgccaatcaatttcatgtgttcataatatagaaaatctggacctaatccaaaactatcaaatactaaattccgcgagtccctcctggacacctaaatagggacggtttgtccattccgccatattggaatatgctaaaaatgagtagagaagtacgtttctgttgcggacaacttacaggttgattttccgtaattttccgaataacgagaatcataaaaacttctaaagccgatctgattttttcaattctttctcttttttttttccttttgaaaaattttttgagctcatcgaaaattttctgaaacgatacacaaaacaattaatatttgtaacatagtagataaaacatgtgtagattgcaattttggaagtaatttatattgtttatgatacggttacaaactaagagatccatagcagtgtgtagttaatttaataaaaccatatgtcctacgtgttaactgaaacttctgcaggttatgcccttttaaaggcctctgacaaaaagatttacaaatctactactttaattgaagatttaaactcttctgaaaaagtattaaaggaatttaaagttgctgctttctctaaatttaattctgcagcaaatgcattagaagaagctaattctattattgaaggtaaagtatctccacagttagaaaagttactacaagaaatcaaaaaggataagaagattactttggttgttagtgaaaccaaattagctaatgccattaacaagttaggtctcaacttcaatgttgtttcagatgcagtcacactggatatttacagagctgtgaaagaatatttaccagatctattacctggtttaaatgaaagtgatttagataagatgtctctaggtttagcacattctattggtcgtcataaattaaagttttctgctgataaagttgacgttatgattattcaagctattgcattattagatgatttagacaaggaattaaatacttatgctatgagagttaaagaatggtatggttggcatttcccagaattagccaagattgtcacagactctgttgcatatgcaagaattattttaacaatgggtgttagatctaaggctcatgaaactgacatgagtgaaatcttaccagaagaaatcgaagaacgtgttaaaactgctgctgaagtgtccatgggtactgaaattacccaaacagatttagataacatcaaggccttagctgatcaaattgtagactttgctgcttatagagaacaattatctaactacttatctgctagaatgaaagctattgctccaaacttaactcaattagttggtgaattagttggtgctagattaatagctcatgctggttctttaatttctttagcaaaggctccagcttctactatccaaatattaggtgctgaaaaagctttgtttagagccttaaagaccaaacacgacactccaaaatatggtcttctataccatgcttctctagttggtcaagcaactggtaagaacaaaggtaagattgctagagtcctagctgccaaagccgcagtagctttgcgttacgatgctttagctgaagacagagacgattctggtgacgttggtttagaagtcagagccaaggttgaaaacagattatctcaattagaaggtagagacttaagaacaacaccaaaggttgtcagagaaagcaagaaggtggaaatcacagaagccagagcttataatgcagatgctgacacagtgactgaatctgctttacctgaagctgatactgacgatgaagaagaatcttctgaaaccgaaaccaaagaaaagaaagataagaagagaaagagagatgataaagatgaagaagaatctaaagaatctaaaaaatccaagaaggaaaagaaagaaaagaaagagaaaaagtccaagaaagaaaagaaagaaaaaaaagataaaaaggataagaaatctaagaaggaaaaaaataaatatgatgcataaatattgacttacaaataatccaaaaaaaaatgtcttttcctttttaaaatatagtaaaaaaggaataatatctttttatttgtttattcttattttgaatttttttttgtttttaccatttcattttgaatcttttgtaaattagaatactctcacttttaagaaatcactgctgaacattgtttgttcagtttatattagtatatatctatatgtgtagcttgtgtttataggatatttataacattaatgacaagcttaaaatataattgaatattacttgtattagggaaaggatgtccttctattgggtcgtgttagttaaagagaaagaagtaggataattaattatagttagaccaaattaactaaaggcatgatcatatgcacatcataacaaactatagtgttacatttattctaaaatacgttattaaattacattatattttgcattaatataatacctaatgttgtagttagtcttattattttctcagcaaaaagaatataagttggataaatcattatctccttcccctgatggaacatatatcaacatgtacatattttagctctcaatatatagtttacaataattaattaaaatacccaattgtccattaaatctataagagaaaaaatgctatgggacatgaaagcatttcatattgttttttaattaggagttgtagaagacttcaaagaacctattgtacacaaaaaaaaattaaaaaaaagaaaaattaatgtaaaacaatacataaaacaaaaataaaaaaatagatgagttcacaataaaaaggtggacttaatcaaacgcgattacttaaccaccaacaaataatcaatgctgaagaagagtaataatcatcaacataagaaggtgcatatatataataagatctattagaaacaggcatatatgcacattttgtggctagtatgagtgaggaaatatcgttgtcaattgaggaaacaaataaactaagaatacaattaggtttaaaaccaattccgtacgatcccccaacaaaaaatgggaaaaatatcgaaaggcaaagccagagtaatatagataaagaaatatcttatgtggagaataaggatagttctcataataaagatatatcttttatcactgaagataaggtgtttttacttcggagtaaattatcaaaaattaatcaaaggataaatggaaacaaaactaaacatgacctattgaataaaagtagtaaagaaagtgaaaaggattggttaaatcaagtagggaagaggcacctaaaccaaaataaagtaaagttacaacattatagtgaagaagaagatgatggttatgaaaaggaaaaaaataacgataccaataaagtttttgacaacagaaatgatgaattgcccataatgaaagtttctcatgacattaatgcccttccaaaggaaggtaacactattttaacattgaaggacaccgatatcattaatgatagttatagcagtaatgaagatattctagaaaatgaggatcttataatacaggaagaaactgagaaaaatttaaaattgaagacgatgaataaagatagaagaagacataaaatgagtttaaaactatcctctgtagatattcataatttagaatatgatatggattctaaatttattaaggacagtatcatagtaggtggcataatacagagtgatgaaaataaagaactaacagcttctcaaaaacagcaacaacagaagttaatacaaaatggggatggtaaaataagagttatatttgaaagtgataatgaaggtgatgaagaaattacggattttaaaagagttaaaataaagaaaagaaaaaagaaaggtgttgagcaaagtttgattaagaaaaggaagaaaattgaattacctccaactatgaatttagttcacttaaatgatgaaagtgatgaaaaagaagatgatgacgatgaactaaataatttaaggactattataccacaaagaaaatctaaagtagcagataatatgaacgaacatgaaatagtcatgaaaatcaaaagagagcaactagaaagacaagagagattaaaatctgttaatagattaggaaacatacataaacaaagtttaacaatagatgaaagttctgcattttttgatcttctcaacaccaatattgtgtcaactaatcctttaatcgagaatcaaaccacaaatagtcaaactttagagaaaacaagtaataacgataagaatataatacatcaatcaccaacgaaagacgatgttcgtgacataccaactaataatgatacagattcaaaagtaaaagtagatttctataatggtatagctgcaacattacattttttaaaagatcaggatgtattaccaaagaggaaagtagagacatcaacaacttcaaacaacatattatcatcgacaaatcagtttaatgacaatatccaagcaggtgataatagagatctaagtcattataatccagaaataaaattggaatacaaggatgcatatggtaatttattgacaacaaaggaagcatataagaagctttctcaaaagtttcatggtaccaagagtaataaaaagaaacaaatgaaatttaaccagaagattatagaaagaaatcagcatactcaattaaagtaaaccaaaattatttgttaataggctttttaaaaggaagagatgacaatctattcatctcttttacatttctataaactcttcggttgtcaaggaaaaaaaataatcagatgaatagagaggagtacgtgcaatctttaaccatctatagaaagtgtttacaaagaatttttttgtttcaatttacttataaaaaatatttttaatagcattatcactaattactaaagattacagtctctactagttaatattacctgacatagataattaaaagctgtaaaagcttttctctccttgaaaacaatgaattggtttttcattacttttctcaatttgatggtatcaagaatcattcatttttagaaagtattttttttttgtttttttttttctttttctttttttttttttttttttgatttacttctaatctgtgcttcaaaaatggggaggggacaagacttttgttatctttagagtaacgatgtaaaatgatggctctctgaaaaataaaaaaaaataaaaaaaaaaaaagaaattctagagcaagaaaatttaaaagttaaacaaaggacgaatgtataataccaacacaaaaagggtctgattaaggaaacagtgttttaggttcccccaagttaccataagcatttgaagaaagggtttgtagaagaatatatcttgaaaccatcaatttatatgagtttcatatattcttgcataaactaactatattgttttccaataacttgataatacttagttctttttatatactcagtattctgtaaaactatcaataaatgaaaagttcatttaaaattcctgattgtaaaattagcgactttctgtcttttctcttgaattctgatgatattaaacggttaacaagtaagtaaaaagaaagacaataacattttaatactaactgagagtaaatattatattgatagcaaagacttttatataatcattgaaggataatctgtattcaacttctcaatgtgcacctttatatattcaatcgttcatacattgactatatacagagtatattgtttttttttttttttttttagttataccaagattgttaaggtctagttcaagtaacactcaacaaacaatatgagacgatagggctataatatttttctaggtacctttctttaggaagatttcttctttttacatagcttttttcatctgaaaaatttttaagaggaaaaccacctactaacgggtgtaatttctaaaactataaactccactttgcaggaaaataagatctaagagattctcgtttctttttctttttttttctagaaaaccggaaaccgacttccattactactattgtttttttcacatcttattctatttctttttttttttttaattttaagataagaaaattccgagatcaataaattttttcttttgtgttgacaaaaagagtattttttttgtttgaatatgcccaatattttcccttttttcctaactaaactaactgagtcatctttatcatccagccattctcccctttgataaaactattttgagttagggttttgtagaaattattttgaaatcacccattcacatagattttaaaatatcataaaaaatcaacaataatagtatctttttttatatagggctgtaatagattttcaaaaacttttctccataggtgttctctttttacaaggtttttgataaaaaaatttttcaaaaaacaccgtcaatagtgatgtactcttccaaaatttgacccacaattgtagtcataattataatctagattgactaattgatagtagcggtgaatctttaattacttttcgctacttttttttacttttttttttttttgttttttcttcctcgatgtgtcaatttaaaagtaatcattatttctactcttttgttccatataacaacagcttaacaaaggtgataatatatatatatattcatacacacacacgtatatatataacgcatcaacaaacggtaccaataatgtcaaaaatcttaattatactttaatcgttcaacatttgataaatttattgttacttttttgttaatagtacgtgtaatatttaaagaacatattccaaccaacatattaaagtatcaagatataattaaattagatctttttttctttctttcttatttgtttccgtttttaattctccgacttattatattcaatccatacacatcagttacaaatataattgtgcgtatatagaactctacactattaatggttagtaataattttatagggaattcaatcaatggtcctattcaagactcttcttcttacacagaaacttcatcaactaagactactttagctaatttagaattaaattcaccaaaattgcatacagttgattcagtggctagctctctaagtagtgagtcatatcttactgatactgaacctgcagagacatatatcataggatctgctaataaaggcatagagaaaaatcatggtgatataacaagagaaactacaagagaatatgataatgattcatcctcagatttaaaagaaaatagtgatactgatagcaaaactgaaaaagagtcaaaatatttttatgacgatgcagacgatgatgattatcctgaaggcggccttaaagcttggacagttgtttttggttgttttttaggcttaattgcttgttttggtctacttaacactacaggtgttattgaaaactatttgcaaaaccatcaattgattgatgaaaattcatcctccattggttgggtcttttctttatttttattcatcacatttgcatcttgtatttttagtggtacatattttgacagaaacgggtttagagaccctatgattttgggatctatacttttagttggtggtctttttgctactgcaaattctactaaactatggcatttcatcctgtctttctctatagttgcaggttttgggaatggagtagttctttctcctttggttagttgtcctgcccattatttcaaaagaaaaagaggtactgctagtgcattagccaccgtgggtggttctgtcggtggtggccttttcccacttctattaagaaaattgttttctttagaatctaaaaaagatccatactatgggtttgtgtgggggatccgtaccctagcatttatattccttgttttgttggctctctctctatgtctagtcaaagaaagactgccacacgttgaggtcgatcgttccaccaccaaacctcgttggaaatacataataagggtctatgtgattgaaagtttcgatgcaaaggctttctgtgatttaagatatgcgttttgtgtcataggaacatgctttggtgaattatcactttgttcagttatcacatattatggtgcctacgcagttagtaaaggtattagccaagctgactcatatatgctgattatggttattaacttaacaggtattccaggaagatgggttccaggagcactaagtgactcatttggtagattcaatgttgcaattggtactctagtaggtctaggtattattatgttagtcggatggttaccattttgcaatgatttgaatagtttgtatgtgattagtgctctatatgggttcttttccggcagcatcttttcattattaccggtctgttgtggacaaatttccagaactgaagatttcgggaaacgttattctacaatgtatttctgcgtctcatttgtaactttagttggtgtgcccattactggggctatcattggtaataaaacagatgctaattaccaacattataaaatattttgtgctgttacaacactatttagtgcattttgtttttttatttcaaggtactttgctgttggtttaagatggaagaaattttaaaggaaagaagagctataaatgtttaaacaataaatcttcatgttctgttccttaagttctatttcttccttcctatacatctccttcttcttaaaatatacacatatatagatacactggtgcagttgttctttccttctcctttttattttcgttgcatttataaatacatttaattattaattaatatttaatttacacacatgtttaaaaattacattatacatttatttttagcattacaattgattttttttccattcatttaaactcttttactcttcttattcatttttaagaatctttttatctgtaaattcttctaataacaaccattttacttattatataagcttaatttcaaaaattcttggattccacaacctttaaataatttatttatagtatcattttcatagtaatttaatagcttaccactatgagagatatcgaacgatttatcactggtttgtgtaatttgactaattcttaaatatatcagtgacatatcgatgctgttaattaattttaatccatcaggggttaacaaatgtggtgagcacattatcattattgatgagttccttttcttgggtgatactagagtattatacgtaccaatgagttctctaaactcctttggtgcaactttagatttattgaatgccttgcattgaattagcacatcaaattctacatcttcacctcttgacaacttatgaataattggatttatcatccttgacttgagtttgattcttttaggaatattttctggtggatacatggtggctaaatcaacttctttccgaacggttgaataaattttatttaaattccattttgctgttatatcaactccgccatcatgagcaccaccgactttgctcaagttacccataaacaatttttcatgtaattctctcattacggcatgctcataaagatttccttgaaagactgtagactttataatactctgattgccatttatataatttaccaataaatcgttataaagagatttctgttctaattgtctaagtaatggtgttagtttcatggccaaatacgtccacaaagtatgttattttcatttaatgtttacctaatatctttgctttcaaagttctattagttccatttgtttctatctctttacttacctcaccttacttcatggcatcgctaaaaatcgtgtagatggagaaatccgagctttttctcaacaatagagagaaataggaaatgtaaactcaaaaatcttcgaggtaatagaatataattttttttgtgtataataaacagagagttctaccggtattactacagctattaatgaaaatagtaaaatgataaggtcttccctatccacacaacatatacctgtattgtcaatattgttatttgaatatctttgacaaatttcaattttttatctgaaaagtgtctgaccaatttttataagacccaaactattttaatttgtttttttataatgagttctaagactgtgcctgaaaactcatcatgtaaatcatcaacatcaatagattctaatttagagagtaacaaaagtccaagctcttcaatcaattcaaaagttccgccaatagaaaataatgacactcgcatagcaatgaaaagtgaaaaggaacaagtcagtattttccaattagcaaatgatattgaaaaagcattaacagagttacaaacagagttatcaagaaatgaaaaagactttcttgatacaatcagtaaaattgagaagcagctgtcagaacagattacgaaatgatttaaggagatatacttaaatatatagttatttccatctcaacgtagcggtttattccttttttatcaatttcattttaatctcttccagttgcatataaaatacatcctcttcagcatatataattttcttcaaagtaactgttgctattctattagttgttaaagttgaaatgtttattttttgcattatattcttttatatattacttaagtaataaatcatcatatctctctatatgagcattatttatcattttatggaatcaataaaaaaaaattaatttctataatttcataccggttaagaacaagagttattcttgagtttttggttttttttcaatatgaccattcatattcggcttgatattggaagcaagtttcactccatcttccttcgacgacatactcttgggtctctttttcttaaaactctctggtgattcatactcacgaactattaatgttaatagcgtattggctcttttagaaagttcatgtatggttctggatctaataaaccaatcaaaagtaaataaatcgcttaacattatctcttgttttatcttttcatataatttatcatccagaaggccatacttatttactgttaaaagaataaacttgtcttctaatgaattatatgttcttctagcattattaggtggatattgaatcatcatttcatataagggatattcatattgttctaatttcttttgtaagacagattcctgatatcttagcttttgaattcttctttcaccatttttaatggtcattaaatatctttcataacctgtaatttcgttgtatctcttccagaaaacttttgcatatgcttccacttcgtctggtgttttgctatcaatagactcacggatcatccgcatattatctcttccatatttagcacatgcatttataaatgatgtaaaatctcttttagcccaattagtaaacgcaagggagataagccgctgtttttctttttcatcatcatcagtgaactctggagcattatcaatcttctcttgttcacttttaattttcttctctaattcgtcctcctctctaattagctcttccttagttttcttttttttctttcctgaattatcatcgtattcttcttcttcttcaacatcatccattacatcatatacagtaacttgataattaatcttcttcttaaaccataactgttctttgttttggatatcatccaactccttggggaaaaattggaaatcttgaccttgcacccatttaggcggtttaggtgttttggtttgaagcgttgttttactagactttgatgaacctcctccaattatttctttataataatcatctacagaatatgtttgttgttggtctcttctcctttctcttctagacggattaatccatgtgaatgttttatcagtattctttttttggaaatttcgaccattccattcataagcagattgattatcaaattcattgaacttttgcaagtcatctaacccaagggcttgatatttagcatttaattcttgtgtcttctgttcaccttttttcaaaatctcatctatgtccacatctgtagtaattctattagtatttttctcaaagacatctttagcaccaaattgaatcatttccaataaatcatccttgttattggcaataccaggagtacgtttcccaatcccttgctggatgaccaattgatctaatcttaacttttgagcagccctttcaataactttttcttccactgcattttctgtaacaaatctatatacatgaacttgtttcttttgaccaattctatgtgctctatccatagcctgtaaatctgcttgtggattccaatcagaatcatataacacaacagtgtctgcagtaaccaaattaatacccaacccaccagctcgagtagttagtaagaaaataaacttttctgagtctggtttattatattcatcaatagcttcaattctctcaacatgtggtgtagacccatcaattctacaatattcatagtttctaaaataacaatagtcttctaaaatatctaacattctagacatctgagaaaaaatcaatacacgggatcccctttcttttaatctttttaatagtttatcaaggacaatcatcttcccagcattataaactaaatgctcatccgtggtataaggtggaccgggttcggcaccttcaaaaaggtaaggatgattacaacattttctcaattgcataacaatatttaataaacgtgtttttccctcacgtttacctacagcaccattcacggcatcaatatctctttctaataaggatttataccattgtaattgcatattggtcatccccacataaacatttgtttcaattttgggtaataaagatttttctacatcagatttcactcttcttagtaagaacggatttaaaacagcatgaagttgttgaaccaatacttcctgatcctgttctgaattattttgttcaaaccattcatcaaacacttctgaatcaccaaaaatatctggtaacaagaaattgagcaatgcccataattcgtgtaaattgttttgcaatggtgtacctgtgatcaacaatctatgacgagaataaaacaatctaatgatttgtgaaagtgtactctcttcattcttaatacggtgcgcttcatcaattactatgtattcccaagcaaattttttaagaactaacttttctctaatgaccatttcatatgaagtgaccaaaacgtcaaagtcacaagttaaaacactattttctactagttcacgtcttagttctttttcaccctgtaaaacaacgacattaacttcgggtgtccacttgttgaactcacgtctccaattatctaaagtagacttcggtacaataactaaatatggtccagtaatatgtttcacatacctaatataccctaaaaaggagatagtttgcaaagttttccccagccccatctcatcagctaaaataccagataatttatgttcatgtaaggaaatcaaccaattcaaaccttgtatttggtaatctctcaacttcccattttgaatgaagcttggtgattcagtgacatattcctcattcctatataaatcgtcatcttcagaatcttcttcttcagccatcagttctgcatcttcctctttttcagattttctattatgtcttgagacggaaccaccgtttaactttgaattttgatatgatgagaagtctgtttctcttaacaatttttgtaaatttttatcatgttttgatttgattgatataaaatggcggaacagatctgtgatggataacaaatactgaaatcgcttgtacgtatcagtttttgaatccctctgtttaacaatcttaggatctacagatagaatatatttacgttttttatcttctggcgtcatattttataaatgctcgtatattttcttaatatctttatagttattattatttttgtgattgttaggaaagtggtatataccaatagttaacaattatacatatatatatgagatcaatgatctgttgttctcttcatttaccttttcgtgtttatttttttttttttttgttttattttttttgctttagtgttttgttttctttttcttttaactgatccttccataataagtaagagaggaagattttcaaagagaagaccaattttattccaatactttaatatacaacattatatatcgacaatctcattgtaaaagcaaaacaaatgactaatggtcataaatatatatatttaaataagcaatgctgtgatatgaaagtaacaaataaaaaaagtcatgatacttatatatagtgtatttagaataattaaaatgaatacaaattaataatgataaagagggtaaacaaggaaaaaaaaaagaaagaaagatatacccataaatatttgtaagatttattttcacgagttttaaacaaggactctttccttggctaaagactcattgaattgtttagatacgtcagatagcttgttgatttgactactctttttctccctaatggagtcaaccctcttctgtttatattcttgaatattttcaaaaaatttatcaaataaaatatctgtatccaatgggccacctttagcttcaggatggaattgagtagagaagataggtctctttaaatgaatcataccttcgtttgaattgtcatttagattgacaaagtatggtttccactgatcagctggtaaagtgcttgggtccacagcatacccgtgattttgagaggtaatatgacattgaccagtagttaggtccattgcaggaatgttatgtgctctattaccatatttcattttcaaagtcttggcaccagaagccaacgctaacaactgatggccaagacagataccaaagattggcatatcgtacaaagttgcatcctttagtaaaactttcaaattagagattgtgtcagtacacatttgtgggtttcctggaccattagataaaaagacaccgtcgaactgttgagcaatgtcttgaattggataatcgaatggaaaaacagtcacatttgcacctcttctgaccaagcatctaataatgttttctttaaccccacagtcgatcaaagcaatattggccgatgggttcttgacgatggcaggaacatggaatggttgttttgtagtaacttgttttactagatgagtgtccattggatcgaagtattctaaaggttgtttatcaccaatagtgattcttgccaaagaggaaccttgttcccttaaatactgtacgacagcacgagtatcgacaccagtgatggctgccacaccttctctttgacaccagttagccagggactcgactgcagtccaatgtgaatactgataagcatattcagcaacaacgatcccaactacatgaatatgtggggattcaaaatattttaaaagattgaattcatcacgagcagtcccggatggaacaccataattgccgatcaaaggttgtgtaaagactaagatctgaccacgatatgatggatctgtcatagattctggataacccaccaatgaagtagtgaaaacagcttcaccggcaacacatttgtcagcaccaaaagaaataccttcgaaagttggaccgttttgaatggaaaaaattgctttagacatctttctgttgtgtatttactgttatgattatattttaatttttattttctttttttttgttcttaattggatttggtatgagattatttgtgtttgaaaaggaaaaaaagattagttttgctctttaatgtgaactagttttccagatgtgatcagatatatagtcttgacaggtatattgggataaagataacttaaacatacaagttggttaagttaaaccgattttcaacaaataaaaataggcaaataataataaagcagcgaatatagatatatatatatatttgagtgtatgaatatatatatccagatatgagcgtgcaaaggaactaggaaatataagctttttttatatcttctctaaatggtacagtggaatatatgtactatacaaataatactaaactgtaactactcaataatttttttaaacaaagaatacagtactaaaagagaagcaagatgatgagccagctggaagaaaaagaacattaagctaacaacaagaatattaaatacatgcatatatatatatataaagatattaatagatgttgcgtagataagagatagagagttgtatatattttttcatacaaaaaggtcgagaagttgtctgactcggtaagaacaaaaaaaaaagaaatttttttttgtaactgtttctaaaggagaaaataaaataaaaaaaaaaaaacacaaaacttgcacctattgtataattacagtcactatattccgataacaataccacaacacaaaggaaactttgtcttgctattgttatctcatctgttttaccaaaacgccttttgtattacaaagaaacaaaaagaaaaaaagaatagagaaaaagacaaaacaacacaataattttttttcttttttttctgcgggaaaattagtcacacaaaggcaaaaaagaaatgcttgctgttttttttttttagttttttttttttttttgactaagcggtttgcccctttctgttaaaaaagttaataaatagatgaaaaaaatgaaaaaaatgaaaaaccaaaacatccatacatccgagagtcacaatgaggtcatctcaaaaacaaaatgagggtttgtggtttttcttcttttgttttctttttttgttcttgggttaatcaatcaatcaattaattagaatatctctatatatgtaaatattgtcatttgttcattttcaaagtctcttgccaggcacacagctaaatattactgtaaaacaggctgtccatacaaagactatcaatccacaccaacaacctcttctaactaacaactgtttaataaaggggtgttttattggaatcaatctgtccctacctccaaggaagtgaaatatccaaggtactctttcgtcatccttttcatttgtctctgccacataaccatttggaccatcactactattgtacattatcctttgagtgactccaaaacaggagtatactatatctacttgatataaccctgatacaatataatacacaccaaatagaaatggaaccaccgtggtgactcttattgctcttgaataattcaaaaatattagtgtatatcctatccagaaccctatccaaagccatatgaaacctaaggttatcctacttaatttcgtaaaattagaaaatggactcttgctgcctgcatattctcttcttggatattttttctctacagtattatcttcgttcaaatttccatttcttgaacctatcctgcggaatctccaatccgatatctcatcatgtaaattgtgtaacgctacttgacttaaaaactttgggaaacaatcaatctccaaaaattgatacgttatgtcctttaactcatggaatatctccggatcatatccttggttatctatcaccgagactactaattcttgtctgagcgaatcgggaatgttcgtcaggtatcgttcacttgtcttatctgattctatatatgttcgtaccagatgaatagcgttgcttaacaattgtttactcgatatatacggcgtcccattttgccctgcaatacctctagattgaataaatgcatccattaacctaggtaaattgttatctgatatattcaaaccttcgttcctaccccattcttctagccacctagatactttgttcccatttgtgttcccgtatggagtctctggctcatcactctccatcagtctgttcattaatacactcgtggtaacagactgcgtactttcgttttcattgtctataaccgataaagaacgtcgtactatattaatataatccttacatagccttgtgtgtgtcattaagtcaatccaaaaatctaaataatttatggcatatgggaattgtgataagtacgtgtaaaatgtccataagtccactggggagctagttttttgaattaatacttcgtataacgtcggcaatctttctctttggatctcttcaaaattttcatccatgctaagtatgtgattcttttgtacttgatgtttgattatatctgttttaatatatttacatactcatctctactcagaaagaaaattaggtagtcaaccaacaataaaaataaaggaaaataaaagaaaataaaagaaggaataaaaagcaaataagagctcgaagcacctctaattttctagttataatactatgtattatacaattatatgtatatatactatccaatatttatcaatctaattgtcccttttctatttttatcattgtttatagtctctttttttacaatgttttcgcgttttctttgaacagcaaactttttttttctgtaatattttttatttttcttttttctccttgcaatcaaaattgaatattatttgatttatttcatatgtggctacgcatttcggcctaattgggtaaaggctggtaggcaacattagttaaggtcactttgacaaaatggagaagattactactaaattgactatacttttgtaagaataacgcaccaatatgacggtcattatgatagtatcattcttatcctctttaaatgtatttatttaactatatccctttttactttaacagatatatatatttatatattatatatttatatatagattattttagaaatatctaattatcgtagtagttgtttgtatacttactaaagaattcaagtaagttgttatttactaacctcgaaacactctcagggtacttggcagcaatttcatttgaaactttagtaagacctaaatcctctataactacaccagtacacattattaattgtctagagaattcaacgtaccatctatggttccagcagcatatcttaacaatcaaatcaatgatcttttggtctaattcattgatcttgagcatgatctgacctgatgtcatattgctattagataaattggataattgtctgattctatttctttcattgacataatattctaataatttcttggctgccaaagatgaaaatctttgtgatagccctttctcaaaagctaatgcagcttcaggtaaatgacctaatcgtcttgcacataaaccatataattcccactcaaaagtcaatttatgataactagaattttgtgcctcaaaatatacttgttcaccttgccataatgtataagtcttcaaatcttcgtatagtagcatgaacaaattatctaaccatctttcacacagtctcttggctcgcaataatgaacttgaaatatctgttgatgatccggattcagatttaatagcaatgttactttcattgcgcccactagcattgtaaatatcctctgtagaactttgatactcatcttccatgacaaacagcttggatctaatctttaatagattctcccatccagtcagttgtacaatatctgttaataatttatatgcaagtggaaatgtggcttttaagcccgatgcggctaaattgattaaagctggatcggcatttttatgttcttgttggatatcttgtggatttaatgaagtgacaccttctaacaccgcatccatcggtaaaggtaaatgtaaagatgaatcagattgaaatggaaccacacgtttcaatatatatttttcctttaacgagaccattggacatgcatttaaagataataaagaattttcaatatcatttaatttgatgtacgatttggataataaataccaaggttcaaattcacttggtgcacaatttactgcagtttgtgctaacatatttgctagtttgaaatcctttttaacatcaattaaaaatttcacttgaacgcataataattctgatctataatctagtggaaataacggaccagcagcattaattacattatttgggatgttttcgatttgcattaattggtcgtgtaacaatttcatagcatcgatttcataatcattgtctagaagaacacgaattaagacaatgatagcttcgggatatgttttcatcaaagtttccaacatcttacgacatttatctactgagtgtgtgatattgactagttcaattaaagtttctatcaaatagttgttcgttcttgaaacattaatcactgtacaagggccaccaagcaatataccattttcataaactagaggaaataagtcaataaataaatctaccactgaatagatttcaccagaagtcataggattaacaattagagtttccacgagattctgtaactcaccatcctcataattatctttcattaacatcattgatcttactacgccactgataaatgtctctgcccatattagttcactttcaggagaatttggtttcacatgtaattgctccccattagcttgtaagataaataattggacggtaccaggaatatgtacaataacattcatatcacattttctaaacgtgttccaagtagacaatgaaattctggcaacttgaaagtttttccttttaccaaaccaaacttggggttgttctacaataatatcagcaatttgttttaggaatatagcaatggaagtggggtcagatgtgtcacatcctaaagagtaaaaaaatgttcccaattcaccctttagtttatcgtgtaaatgcaggttatttaacatattatttgggtccactgtttcaatttctgtgttattgtaattatttgttacattagaagaagaagtattgttattagttgtagaattactattagccccgcttgaactcatatatttcaccatagttattaaatctggtggacctaaatctaaaaattgagacaatttctgtttacgttcatttaaagcataaccaatggcatcttcttttacctctgggatggaggtttgagtgatcatattgtattgttatgtacaaagtgatagtgatatgtagtggttaggaagtcgtgaaaaaaaatattaatattgttaaattaaagatattttatttgtttaaactgaaagtttgaaatagtttctatcttacaaatagtatatgcagttttgaaccaataaggaaacaatatatgaggaaactattcctggcgttagagattctttttttcaactaaatctgttaaactcttttatgatatatcttagagagtgacaaaataaaaataaagaaattaatgaaatttttaaaggtccagtaaccaaaataaattgaacttttgagtaaattaaattatttgctgagaaaatggatgaaggatcatttactctttgtttgatagatcaaagattgtttgatttctgttagttatagattttctgtttttctttcgagaataataattataataataacaaatacagcgattattggaaaaaagaaaaaaaaagaaaaaaacagataaatcaaaaataaaaacacaagcaaagggacatacaatatatcgttttatacgttacaaaaggtagaagaaatggaatataatgttgaaatatgtattagagaatccatgaataagtgatagttttcatcctcttttcagttgagtctgtttattaagttacaattttgtgtttacttagtttaaataaaatagacattggtagttctgtatagatagagatatatatgtgtgtgtgcatgtattttattatatatatttgttttttagttattcgacagtgatattggagtgtaagctgttaattaaactatcttttcttatccattgcatttctagccatttttctaattttttctctttcaatgatagtaaagttgcaattggatgtcttttaatatcaatgataatgataacaggggaagtattattcttttctatatcaaatctacattgaaaaattttgaaaaatgagggattgatctcttggatctgtattccattaatggtctttaaatttccagtgtcatgattatggccttttgtaactaatatcggtgaataatacactatcgtcacatcatataaaaatttgttaaataagattgattttttttccttttgtgtagaaacaagtgagttactcaattctaatatttgcttctttttctttaattgattgttgttggcattcctgactttttgctcttgccaattcggatttctgttcgacaaagatggaagacaaatcacatctttaaaggatttcaatatgttgataaattggttaaatctaggtgataatacattatagtatttattaacaaaaggataatacacgtgatttaattttctctgaatcatggctaattctgtggtgagtatattaacttctgggaataaaaggaacacattctctccatttgcttgaataaactgttttatatttttagaatccatagtaatattttcatcttttaacaatatattcttgaagaattttctcgttggtatttggaaaacggtgccccatgagagaaatgagaagtgaatgttattggttgtttgattattttcccaaagtaagaaaaatgtttctatgaaagtgtcagattccttgagtgggccggaactatatagtgtgatataagcaattaacaaatagtcgtttattgatctgtgattacttaaaattagtgttgttaataaagattctccacaaaacaatagcaattcctcgctttctccagtaaagaaaatatcaatattgttgttttcaataaagcatatttttatcaatatgacatgaaccataattggcaacacaattttcattttagtcaaaaacggtaatatatcgttatttaatgtattttcaaacaagaccaaaaagttagtcaaactgtttcctagtattggtataaaattgagaatttttttcattcgatagacatttttaatatacactcttgaattttgaattgatttgagtacaaaactagaggcttttacaaatagtgttgttttaattaaacatagaagaaaaatcagatgatatagtgcagttatccatttggatatattccatttagggaacttaaaatcttcacctattaaatatactgtaaaaaaatctaaagcgcccatctaagactaattcttgctgacagacaattattgaaaaagtatttttttttgcctattttatatataattctcttcacaaatttagcaggtcttttctttcgtttgtaagaacacatgttgtccaaaagaatctatatttttgttgttgtttttctttgcttgaatattaatatattttgtgacacatctcgtcacttctctaatattcaaaaaaataaaatcgttttttctgatttacagaagcaaaaaggtaaaaataaataaataattttttatgaattttctttttttttaatttttttctgaataatagacttgatgattgaataaacaaactatataaggatatatagttaaatcatgtccaacagtatagtactgtcctaaactgcattatttatcaagtttaagctgtgttaatttttcttgcccaattcatagttttttttatcccattaggagcttcaagaagggtatttgtcatcagcaaattattataatgcctttgaaattataaatgattcaaacatgacattattttagatttcatatctttatgacattttgtaactctttaagcatactgcgaaagtaaaactgcgtaatttttcatattttgtgcttaaacaggttctagttgacacatactgtcgttcaaatataaagaaactaggttttgcaaaagaaaaaaaaaactaaactttttcaggtttgttatattttatcattttaatcaatatttatgaaaagacatgtaaaacaagcccatatgaataatatgcaagggattaccttaagtagtatactaaaatatggatattaattatatataaatacttacaaattatacaatcggttgattccaactattaaatagattaaggctagttattcgtgttattcttcctttgattaaacatattagatagaatacgaatgttaatgcttatagttgcctctgacactatttcttaataatcaagggtcccttaagtaaacttcttagtaatttgccatcaatgttcatccgatgagtgtttgttcgttcaaatacactcacaactttgagcccagcgtttcagttgttccaagttcttcgcctcaacatttggcgttatttgcagaatacatatttcgggatatccaattaagattacttacataatacatatttggttcttcgaccctaacttgtaaaggctttgcatgctcaaagtcatacttctatttcataataactttcattgagaaaaaaggagagagaataagaaagaaagaatctatttgatttcaagctctgttttctttcacggaaaagggtaaaattaattgcattaggattgtatacaaacagaaaaagtagtattttaagattgtatttcaaagctatctaaaataccaaattctctcaaaagaaagctatttaaaccacatatatatatatatatgtatatgtatatatatataatcttaagcattaactactgattatttatgtcatcttaatccttttttgttctaaagaaaatcctgtcaaataaattattttttccaatgtataaatgtattacacaaagtttctcggggcccattccgcggaagtgacttgattttgaaaaatgattcaaacaacaaaaattttgggcatcaattttgtttttttttattgatgggcaaaaaatggcactttaaaaaaaaaaaaagcaaaaaaaaaaacaaaaaatcaaaaatggaaaactaaaaaataaactagatcttgaataaataaatagaaaggtttaatatagtgtataagtatgtctatcagatcacgtgggtttctagctgtttttgtagttaagatagtaaaaaatagccaattgcctttgcatacctaccaaaatatattatgtttcaagtagtcaagtattctattttaaagaatggcctagaagttagtagaacttctctaactagggctcttatacatcaaaatattatactaaaatcatcgacaacaaagctgcttccatttgggtatactttaaaaagatatcagtcccagttgtctcaacttaaaaatgacactaaacatatagcgtcaacagacactaagcgttctgagataaataaatgtcagaatgaaaatatagaaaatgttaccataaaggataagaaatatagaccacctgttgatttggcatttaacggatcttaccaagaagattatcaaagaataattagatacactttgattccactttcacttgtaccgttttatacctcgtatgctggaattaccttacacccaatttttgatataactttatcatctttatgcttatggtatcttcactatggatttgctggtttaatcatcaataaaataccaaaggagaaatattcaaagacacataaggtatcgatgtggtccttatatacagcgacatttttaagtttgtgtgggctttaccaattagagacagaaaataatggtatggtcaatttaataactagaatttggaatgatgatgaaagtcatatctacatttttggaaaatgagtagtggtgataataacaatataacaatataataacaataagtaatgtataaatattgggggggatgatgttttttttttcttttttgtaaatagtatattgcatggaatagaaggactgatatgtcatctatattaaaattgtgaaaagtgatttaacaacatatgctattggatgcagatagtggagaaggttatagacacataaacatgcacacacacatatatatatctatatataatcatattaataattgtatagataatagtgaattagataattattttatttgactataaattcgcatgttttcttcctttattatttgtatttttcaatagtccttggcagcacctcttctagccaattcatcggccatatcgttacccacatggcctgaatgtcccttcacccattcaacagagaaattgccatggttagtaaaggagtctttattaatttcataatatttcttaatcctaacgtactttttgatcattggtacaattaaatcagcattacacaaattctgtaattcagtttctgaataactaccatacctatcatttaacaatttagcaacatattctgaatctgttataatcttataattaactttattttcattgttgtttaaattaaaccatattttatctaaggcacttgatacagcttcgatttcacctctgttattagtttgaggtccagattttaatctttcagatatattatactgtggttcactttcaaaatatgcagcgtaaccagcacgggcgtttaacgaaccattatttaaagatgacccgtcacaatatacgttacattgtttatcatatttttttgttttgttcaaagcatatttttttttaaaatcagattcactataaccaatcaagttaaaatcaatatttgggttcacttcgcctttaataaatctatttgcatcctctaaagattcaaattttttaaaagtcatacccttttggtggtgaacatagcctttacaatccttccaattgttaaaaactttactcagtaatcttgggttggaacttctcactgcataatagtttttactgttattattaccatgtttattactgtttgaacttggtgttataatggaggtcggtatgggtatgtagttggtatgtgaattatgtgttggtttgttaactctttgtgtttttttatacgcagtattccttgacttaatgtttggcttacttgatgaattctcataattgtaagtatcagcattaccagaagaatcagaaatacagttaccatttgaactataaccacttgaaccattggcaaattcctgcgctgcaaccaatgtatcgaattttttatagattgagccactgtaaccaaaaatttgatcacggcatgagttccagtcactgtagacaccgcgatttcttcccttctgtacggcgtaataatattttttggccatatttagtattagtttgttcacgattctcgttttggtaattttgctaaaaactagttaaggtgacatggttttgtagagtgctgatattagtcttcttcaatatagagatttgcctatttagcatagctatttttgcataacaagatgtatttgtatcttgaatattgaaagatgggaattgatttgcaaaattattattttactttgaaatttttgacaaacagaaaaaaagcaaagcatgttttttctgtgagtagaaaatgatgaaattgtatattgtccataagatcatttgatactgaaatgattttttcataaaaacaaaatattttttttgggaaattgcatttaaagttcactcatattttactgtggtgtatataagaattgaggttcaaaataagttcctttcaaatattattaatagaaaataattcatgagcatttttttttatttattaaatatagtgacgaggctgctttttcattcgcattttctgttaattacgaaaaatttaatccatttcaatattagattatgaaagaataagactggaaataatatataactgttggaaaatgagagtttattactgtcattttcataagaattatttttaattagtttttctatatattatgtggtgtacggatgtacataatatcaggaaaacattttaattgtcaccaaatatgtctttcgaagatttgaaaagaaatgaaaaactttaaaagaaaacttaaagtaaataaaagaatgtatactgaatacactatataataaatatgtacaggtatttaatacaaaaacataacaagtatctataacttaatgatgtctatcattaccatggacgcagaaggctccaaattccaacaataactgttatttttaaaaagaacatttaatatacgggttgtatattttatgtaaaaagatattcttaatgaaaccttttgtagtatcattttataaactgtcgtttaatacttttagtactagtggattgtgtaggcctatttttgtattgaggtagcattttatattcataactaatattaataatcgaccaagtatcaaatatatctaaaattaggaatgataatggctaatttaaataaacaattaaataaataaaccgttggaatgtaagagttttatcactatcttttccaaaaaagttagttttaatttggtgttcttgtatgcaattccctatataaattcacaataatattctgagaacattttatttttttagcaaaaagagttctagtaaaattcgagggagaaaaacagtgttaatagaagtgttgaaagcaataagaaaaattatacttgacagaaaatcaatgataagcatgtatgttcaaaaggaaaaaaataaaatatgtctttataaatgagttacgctatttgtagatagctaatttgaggagttttattgaagaataagatatcataaccgtggaaattacataagattcaagtcgaatctagaattacctattgttattactatgtagcccatttactatcacttatctcaatatttatgctgttttctacagtaatctatggtcctaaatattctgtagggttcacccaaattattacacttaataaattatggcatagattactaatccattaagacatcagattgaatagttgatcaagtcagaaacacataaaaggatatagtcttctgaagaatcttatgtaatcttggcagtgatgattcatctattataccagggagttaggtagttagtttccgtgatagtttaatggttagaatggacgcttgtcgcgtgtcagatcggggttcaattccccgtcgcggagtctttttataaaatataatataatagataaggatatatcacgagagatattttcttctagaacaccaaaaaagatggacactttttagttagttgtcatgtacatgatatataaactaccctctggacaaggaataaactaacatacagagatatgcagatacttatgtttctgtaagcaggagaaagaagaaaaacaagaatgtcatcgtcgacttaacaattccaagctcgtttatagtgatattaggatttcacatgtcacatataaggtattattatacctgaagagtaaaaaagttggttagttgttgctgatatattaaatgaataacatattagtttagagaagatataatgagtttttaacaattcaaataagttttggagatgtttgacattataatataaaaagaaaacgatgataagtaagctgcttccttctttttgtttctttttttcaaatcgtgaccacttaaataaatatttattaatacagtttcaaattaaattacgtagataaatggatataaacatatgtgttgatttccaagtagtttcttaaatatcttcctaattattctttatattttatagtcttatgtaaagacaacacagattatttctcaaaagaattgagtatgtaaagtattaaaaataatcacaaatgtcgataggagttagttagcataagatttattagctgtaatatgaattatgggtaatattggtcatgccatgaatcaagtgataatattaatagcgatatatatctatatatatattgttaatgatactatcttcttatcgtaccacttctaaaaggtttaaatgagttataatttttataatttgccggtttataatttctgcttctattattattattattcatactgatattgctactatttccattatatcggctattctgcatgttattcaagacattattcggactatatctgtttgaacgtggaaaatctaatggatgattatttgtattaaagctattattactgttgttgttgtaacggctagttttattagaaactggtccattatctctgcttgatcttttcctttgtttgctattattactattactgttattattattactgtaataagattcatcaatttcgtaatcattaaaatcaaaatggttattattattgctgttttgttttaatccattaacataattataatatgatctttttaatttacttggtaaattatcgccagagaacgcactaccatcatcattgggaactctagaagaccttttattatgacaatcatctccgaaatgaccttgagaaccacaattgtaacaaaatattttatcaaacggaattttttttagtaaactagtgccggtctttttattctcatcccttattaaatagactctccatatgctcgggcatcgctctcttgaatgttttttactgttacaaagtgtgcaatagactcttttccatttatgtggacattgggatctatagtgaccattttcattacaattagcgcatttaatggcctttggacaatgtttagaataatgatcatccatggcaccacaataggtacatatgacatggggacaatttttctttaaatgacctctttgtgaacaattactacacttgggtacagcttctttaattccatcttcttcatcatccactacaccgaagtatctaccttgaccacgtaaagttcgtaatgattctggatcctcgtctacttcttctatagttggtgcgataattttccttttggaatcacttgaatcctcatcctcagtggtactattttcattgagtttatcatttttttgctcgtcagtttcactaatattcgttattacgtaaggaagagtgttatccataacctcaacttctgataatagagatgacatatagttactattattattagtagcagtagtaatgttggtggtatattccaattgctttaaaatattaatatttttttttttaaaaaaaaaaaagagaaaacaaagaataatgttttataatattaacaatagttattgaatattatatgtatgcgatgaggcaaagtgataaatatagtcgctttttttttgtttgtagaaaattagatgcaagaaacaaacccattcaccttgtagatttttatctataaagatacatataagtatatacgtgcatctgctgtttatggcacgaaacgatagtaatatgaatggtaatatgtaattaaatgttgctatttaatgtgtgtcttgtaaagtttgtattaataatacttcacagtttttcatttattttttattttttttttctgtcaactgagaaaaaaaatcttttttttggtggcatcgcatcgctcttttttttttgttgttgtttgctgaaataaactccacggtttggtagcgggagtgggaggaaattcgtctttataagatcatgttgtactgttactttaaatacagtaaaactaattagtctatctggttttcatctttacctaccatgtatcatattataccacattgtatttctgtgtagtgtgaacgaatcactttattctcgtttgatacgaccgcatcaattgcttccgtcattttcaacagcgtttgcttcaggctcagcttcgttcatagtgatattttactttttttttttattttttattttctttttttttttttcttcgtttttgatctctttgccagacatttgaaaatttgtcaacaaagctggtcctcgagaacaaatagaaaggatggagataatgatgacgatgatgagaaaccataggattaaagcgttatttttatctcttaaaaagtgggttagtctctgtagaacataatactttattattttatttttctgctttttgttttccctaaggtaaaccttttttattttgttaacagcttgaagaagcatacgatttttaaaataaaaatgagcacagctgaggttgctgaccaagttaaaaactcatctgccaaagataagagtcaaaagaagtctaaacaaccacaacaacaattgtatttagatccagaacctgcctttattggagaaagaatccaatttttcgaaaaattacaaaaggaatatgaagaaaaaattgcttctatgccacgcaatccattgaagattgtcttaaaagatggttctattagagaagctactgcttgggaaactactccaatggatattgctaaggatatttctaagtctttagctgatagattatgtattgccaaggttgatggccaattgtgggatttagaaagaccatttgaaggtgaaccaaatcaagagattaaattgcaacttttagatttcgaatctgaagaaggtaagaaagtcttctggcactcttctgctcacgttttaggtgaagcttgtgaatgtaacttaggtgctcacatctgtttgggtccaccaactgacgaaggtttcttttatgaattcgccgtcagagactctttgaaacctttagaagaaggtgaagaagaaaagactgtttctcaatccgactttccagctttggaatctgttgctaaaaatgttatcaaacaaaaacaaaaattcgaaagattagtcatgtcaaaggaagatctgttgaaaatgttttcatattctaaatataagacttatttaattcaaactaaggttcctgatggtggagccaccacagtttacagatgtggtaaattgattgatctttgtgtcggtccacatatcccacacactggtagaattaaagccttcaaattattgaagaattcttcctgttatttccttggtgactctaacaatgattccttacaaagagtctatggtgtctcattcccagataagaaattgatggatgcccatttgaaattcttagctgaggctcaagctagagaccacagaaaagttggtagagaacaggaattgtttctattcaatgaattgtctccaggttctgcattttggttaccacacggtacaagaatttataacactcttgttgaccttttaagatctgaataccgtaaaagaggttatgatgaagttatcactccaaatatgtttaattctaaattatgggaaacttctggtcactgggctaattacaaggaaaacatgttttcctttgaagttgagaaggaaacttacggattgaaaccaatgaattgtccaggtcattgtttgatgttcaaatctagagaacgttcttatagagaattaccatggagagtcgctgatttcggtgttttgcatagaaacgaattctctggtgctttatctggtttgactcgtgttagaagattccaacaggatgatgctcatattttctgtacttatgatcaaattgaaacagaaattgaaaatatcttcgaatttttgaaatatgtttatggagtctttggttttgaatttaaaatggaattgtctaccagaccagaaaaatttgttggtgaaattgaaacttggaacggtgctgaagctaaattacaatctgctctagaaaaatggggtggtaattgggaaattaatgaaggtgatggtgccttctatggtccaaagatcgatattatgatttctgatgctttaaagagatggtaccaatgtgctaccattcaattagatttccaattaccaaacagattcgaattagaatttaaggcaaaggacactgaaggtgctactgaaaaatatgaaagaccagtcatgattcatcgtgctatcttgggttctgtggaaagaatgacagctatcttgactgaacatttcggtggtaaatggccattctggttatctccacgtcaaatacttgttgtcccagttggtgttaaataccaagaatatgctcaacaagtccgtgacgaattatgggatgctggtttctatgcagatgtcgatttgactggtaacaccttacaaaagaaggttagaaatggtcaaatgatgaaatataacttcattttcattgttggtgagcaagaaatgagtgaaaagtctgtcaatattagaaacagagatgtcatggaacaacaaggtaagaatgctaccgttggtcttgacaccgtcattgaacaattacaaagattaaaggaagaaaagagaaatgacaacgttttattataaattaaattataaaatataatagagagaatcttaagtaagtaaaatcatatatatatatatatatgtatgtatgtatgtatgtattttatgtaattgtatatgttacatttatgtttattgattgttatatagttaaattagaaataacctgtttctataatttcaatacatttttgaaatattatttttctatgttaattctaagaccaaaaaaatgtacatttgtataaatataaattatttaaaaggtcccttttatatatagacgcagattaatgtagtgttttaatgacttctatgaattatccaaatttattgaagcaatgaatattaaatgtttttttttaaaaaaaagaagaatatataaatacttaagtttattgaatactaaacattgattaattgcaaaataaaatacagtaaaaatgattagattgtaaaggagataatttgtagcagtgacattaagatggtataaaatataataattaaacttagccttttctttctttttctaacatttgattaaattctcgttgtgaaactgtttcttgaggatatgaaataatctgatcattttcataattaaaatcatcgaataaatcatccgaagttgatttatcttcaaaattattgactaattgattgtcattagaaagacttttagttctaattctatcccaagaagatatatgtttttgattaaattgttgtttttcatttgtgccccaaagtttatcaacatctgaatcagatggaaaaacttcatcatgtgtaatatcatcttttatagaagtttcaggatcattaacaaagcctgtacctttattagtatataggcccatgggatccttttgatgcataaatggggacacagatattcgtttatcactattttgttgtagttgttttaatttctcttctggatcagaaaatgcacgttctggatgtaaataagtaatataaaaataggaagcccaacgagcactaccaccatttttcaaaagagtcagcatttcaaactgtctctcattccttgatttaattttgtttggatcatcttctaaaaaatcatcgtgtggatatatgttttttctagataatttaccatctggatccagtttgtgcaattgtttgttataagagatgtgactagctaaggatgaagagataaaggttgctaacaaccctaataaaaagtttttggggactttaacattttttatacttcgagtggtatagtatttatacataaatggggaaccaaatactgttaaaaaccctagaaacccagcaatggattgtgctctggtaatatttttataagtattataaagttttaatctatcgtgagaatctagaactttatccttttcatggaattttttagctgcgatatacgcttctctaaaccaaggtttatctaaatgttgtggaagagttgggtgtttagtctctggagaatctacttgattcattattaaccagctattagaaacaaatgctatctggtactggttacttatctcatataatggaaaaaagactggagagagagttaggtggtagaaaggaataataattataattatgaaacaggttattccttctagatgtatattcaagtggtggaaatgtataaataaataaatactgagtaaagtagtacaagggaaccaaaaataaggctatacaaaggttgcatataatagccaatagatgctttttcatttatacgtaatatcatctttttatctcatcccttcttgttccatccagtgctttatatatttcatctatttcagcggcgctctcatattgaagtagcatgtatctgatagtgcctttatttttctattacgacaacaatgttgtttttttttttctgttttttttttttttttgatttgaattcttgaagaagtaaaaaatgtttaatatgataaggtgaagtaagaagaaagaaagaaacatgaaagcagcaaagttcttaaaggttagctgattttggcgtaggcatctgacgtttaaaattaatatattttaggtttggcgattgtcaattgcctcaattgcactccatactgcaagaataatttagttcgtttgtgagtacttaacccctttctgcctttaaaagagcattgaatagaattggtttgtttgtttattaaaatggattacttcagtattaaacaagattattattcgggtaatttctctcatgttttacaagatattgaaaaacaaaacattgaagatgatactttgttgttttataaattgaagacattattggcattaaaaaaatatgagttaggtgtatgttcaaataataaacttggtttcgtatttgatttatactataaatatttgcaatccaaagatatttctgaattagaatctaatattaaaatggagacagctactccctatgaaataaatgtcttagcttccgcttttgctattgacggtagattagatgaaagtttagaggcttgtgtctatgggattgataactctgagttgcctggtgtaactgaactattattactggcaattcaagtagctttgcttgatggccaggtaagcattgctcaaaccatgttggataattttattaattcccaagaggatgccataactagtgaggatgaattattagttaatctagctgagtcttatattaaatttgcaacaaatcaagacactacatcatctaatttctattattttgaagaattgtcgcaaactttcccaacttggaaaactcaattaggtttaatgaatttacatttacaacaatctaatattgaagaagcccaggggattgtgaatgtccttgaatctgattattattcagtagaacaaagtgaggctgctgaattatataaaccacattttttggctaacaagattacattagctatattaaccggttctgaggaggttgatgatttaaaaaatcaattagaacaattagatccaaatcatccattaattaaaaataataagagacttaacacagaatttgatgaaattgtagctaaatataaggtttagataaagttacatattctgatcttcttataaatacagacatgaaaaagagaaagaaaggagaaaggaaggaaaaatttatttaattattcttgtttccttttatctcattatttaaaatagaaataagtaatatgtataatatgatttttgcaaagaaatgtataataacaaaatagaaagcctataacatcttggtaaatttacacaattatttgtgatataaataaaatataagggagagaaataatttatagaaggatgaatctattggaagtatcatttgaacattattttggttcagtgtaaaattttttcattttatcctttatttgctggttgccagctttaaattttatatataaataaaataaataatacaatgtttttactcattttttagtttcacttctatagcccacaggtttaattatgttaataaacataagaagagacatctagaaagttattttaactagtcgtcaaatttatttgttggaattattaagctatttattataagtagaatttttcaatttcttctgtataaattgtgaaaataaatatatataatttcaactttgggataaataatttattcttacatatcctttccatgttatttgtttcactggttgtaattaagttataagtaataacgcctatgttgacttgtctctagataacttctcaattattcttataggtttgtgtaatatttctaacaattggcaagagtttactagatttagctataatctttgatatatagcttatactatactcaagaataatacacttttattaatatcttgttgaatgtatacaaaacttttggattgatttttaaaattatttttagttaggaattttttagtatatttgccggggttaatttgttaaaacaactgtcaaaaattaattataaaataattaatacgcagagaaacaaaccaaaaaaaatataaaataaaataaagctatgttattactaatattgtaagacacctttaagaaaattgtttgtaaaaactttttttaatttgaaaggacatatattttttatgagtctttttttttttgcttatttattatacactatatgacattagaaagaagcataattattatatattgtaagtccttctccattcttagtgtacgtgagatttttttgcgcaaagttttgatctcataaacgatcaaaatctaagtcatcttcaattttgaatggtttaggcactggtgcattaacatctttgacttgccttatagtcttgattacctcaacaggttcattaggttttgtgtcatgcaatactattataccagatatgttcttatttttacgaacaggtgtgaaacgagactctttaataaatgaaatatacctagcttgttgtggaagaacacgcttcatattttcaatttgatatggagtagcagaatatctgtttttaacaaaaccttccttagactttgtttcttcttcgttatccttttcggttttgtcttctgcattttcttggatatcttcattatcttcacctttttctttcttcattctcttagctctagctttggccctggcagtagtagaaagaactgctgtggctactttggctacttccttactactcttttcttcatacatttttggatagtcgaatacatcaggtctactgaaacaattcaattcaaatttgggaatactcaaatctttactgttaacagcaataacagatgtaggagtaaaagacaaagataagaaatgtgctaatgggaaccaataccaaaattgtgaaaacataactagcccaacaatagactttgtatcgagtgtatttgtttctggattgtccagttgtatggtaacgttacgaccacctgcattgataataccttgtgctatacaggcaccaaatttagctaaaccttcttgatgtttgtttgttattacatttaaaaacaactcatttagttcattgacctttggattcaatttatctgtttgttggatcataattaaagataatgcaatcatggcagcttgacggacaaaatcaactggatctttagttagagattctaggacttctacagcggtatctaaagctttaccagcacatgcagtacccaatgcaaatgcagtaccacaacgaacatgtgggttatgagatttagacagtaattccacaattcttggtacagttgcgtaatcacgcaataatatgaaacctagcgatgtaacagcagctcttctaacatcatcattagaatctgacactgcaatatgaagtaattttttaattgccttattattactagtaccgacgtaggccatggctaaagtgaaagcaccaccataacgtaacaaagtgttttcgctatctagcattttattaataatgtcatcagccatttcctgcttgccataactcaccagagctatacccatagctaagcctcttgtaatattgccatgcttagtttcatgagcatagaagaacatgctattgatagtatcttcatcaccagaacccaacatggtaagaccaatacctaatgcagcagcttcacctgatacagctgagtcattatataggacttcacttaaagcttcattaacttcactgtcgtttgtacctaatgcagctaaacctaaccctaaggaagcaccatgtaatagaacatcaatatcaggatcagatgtctttgaactgttttccactatgttggacattagataatctactatatccgaaccatacccagcatagattaaaccaagactgtataaggaaccacctttaatataacgagatgatgctcgactacctggcagatatggattcataacttttttaccatcgattaaattacccttattaatgacacctaaggatgcagtggcggtaaacttagcccagttttgtgctttacctaaccatggtaaattatttttgataaaagaattatcagcagtacccgcatgcataaacccgttggctacactgactgcagtatggaataaagaaatcttgccatccagagctgatttagtcttgtttagtaactcaatatcaatatttttattatttaaaaggaaagtagtctgcatatcacaagctgggacaccagataagattgttaacaactgggtaggaaagttttgttcagttagcctattgaccaattcggttaacagaccttgagaagcagaggccacgatatcaaacgcaatttgataggataaagcattgctgttgttagtattttcatcggtttgtaatttttcaaataatcgaactgcataatctggatcattcaaattgactactactttcaaaagagtaaaataatcgatagatttacttaacagtatgatatcgaacaaagattttaaaatatttattctaaatgaggagtttgaaacagtggtagaagatgcagtcaaaacatagtttatcaatttgcaggtgttagattcggtatcatttttcgatctatcctttagaattttttccacaatatccaatctaaaaccttctaatgctattcccagagccaatctatattctccgttaatcacacaattgtccaacattttttcaaagattgaagtcaatttagtattaatatctttttttgtttccttggattcatatttttgagtagacaatttaatgtacatttcaatacttttagatacaatagtctcaacgtattgagtcttttcactcatattgaagtaatcctcagcagccaaagcgtatttaactgcggaatcatattcacccaaattataatataccttagatgccaccaaagcagccattttacgatttgaaaaggataaatcatcgtacaaggcttcgatgtcaggtaaatcattagacacttcgggccattcttggtcaacaataccgttaatagattctaaagcatatgatcttatagcatcatcagattctcttaaaagagccaaaagaggagcagcagaagttgcagacattttttatttttttatatatttttacctgtttgtgtttatttgtttaaatatttattaataatgattcaataaccgatctaatttctcttttattttattttgtcaataagaaataaagcaccacttcgataaatatgaaaaaaaaaaactaaagtaaaaggaatttatatctatatatttttgtgtgggtttatgtgtgttatttttttttcttttttatctcgtgatattgagttgtcttcaccttatacaaagaaatagtgaagatatatggtcttatgtatatttatttatgtatgtgtttatttgcatatgtgcgtacgaacagcagatgatcgaaagttaaaaatgtggtatgatatttttttgttgtttgttctagtatacacttctttactttctttcttttttttattttttttttttcttttttttttttttttccttttttctttcctttcccttgttttttgtatattttgttctactaagaaaacaaaaaataaatacagtgcttattatattttagagatgagtgcgagacacaaagactgggataaatattaacgggagtggcaagaaaaaagagagaagagataaaaagagcaggcaagagtagagaggagaatattgttgttggataaggttatgtagtaacttttttatatcttcttgtcgtcctacttaatcaagcatcatcgtggtgggtttctatctatgcataactgggtggtttttttctctcttcctctctctttttccacgttttccacgttttctttctttctgtttgtcgttatttcctttttcaagcttatttttcaatttttgccacttagccaactctcagaaaaaggttacccggttaatgtgggtgtgtgggtgtattgatgcatagaggggaaaagaaaagagaattcgattttactattactaactactattagatgagtttcgatatataattgcaaaagaaagaaaaaacatcgaatatggaggttttctctagaatagtttgtgagcaaatacgttcatgtttatgtctatgtttgtattcatatatgatcttataaggtaatataaacttaacaatatagtaatctatctaattagaattttcttagacgtagcttccagttgttcatatatatatatatatattatctttgaataactacttgtcataacatcagttactagatatgctattgaactggtggactcgtaacattgtttttcaatgttgtatttccgcaatatgctattgattgtctttactacccctggcttatttttgtggatgtatagtacacgaactagatttgtattatcatccataggtctttctgttgatttgatatggtgtgcatctgattttaattcaatctgtcggaaatttattgcaccgatggaattgccctcatttatataactaattaaggtattagatactttttcattaatgattttttctgtttcttctgtggatccacctatatgtggagttaatataacattaggtagattagataatttattcaaccatttttctaaatgattattggaaatgttttctgtatcttttaaaggcttattaggatacacgtccaaagcagctcccataattttcttggattctaatgttctgattaagacatccatatctagcgtacttcctttggatgtgtttattatgtatgaacccgctttcatgagatcaaagtgtgatttacctattaaattgaaagtttcagaattttcaggtacatgtaatgtaacaaaatctgagtttcttaacagactgtttaaggtggaaatctgtttagttgcacctattggcatcactatctgaatatcataatatatcacgcccataccaattgcttctgccaatattgaaacttgcgagctaatatgaccataacctataatacctaaaatttttccccttatctcccaataatgtttataacctaatttccaaattccattatgaagctcttgtgacttatcactgatttgtcttgatagatttattatattgccaatcactcattctgcaacagaacgggaatttaagaagggtgaatgaaatactgctacacccatacctgttgcatattcaaggtcgacattacttacttccacactgaaacaaccaattcctatcaaatttttagcatgtctcagaatattagcagataagtgagtcttaggaccaatatttaggatatgaacatctcctattattgaaatcagtttagtatcagtaagcaaatagttataccattcagcttggtaaccttgttgattgaagatttcaattaactcctgagatgtattctctaacaaaagaaccttaatatcattctctgccaaggttccagcagatgactgttgttgcatgaagggaagtctctttggaattaaatctataaataactcagctaaagatgttgttgactcttcctttatgtttattgcaggttgcgagtatattggcataagcatctctatactggaagatgtcatgaagatctataaataccgctaaggtgtatccggtatagtatattattcattctcacaccaaaaaaaaaataaaaataaaacagttagaaattgtcataatctagatcagatctttagacgtataaataatcttaggtaaaagttttcatcattactattaaaaaaaaaacatttttgataataaagtttacaaataactaagtatcgtttttccatatgatcactatctttgtgttgttattttaccctttaactgtgggcatattgatatcttttaattgtggtaaactttttaaccctttttatcctcaaaacaataaaatattatatcaggtgaatcttttaatttcaggttgttacacattactgcaggtttattatttctctttactatatttgactaattggatcgtcttgaatattagcacttgatatcagtgaatgccacatacttttcagttgatcttttagatcattattaacaaatttggcaaacaacacagaatatttgcaccatttgattgcgttttcttgatcaccaaatataagcaaatttacaccaacattccatattaatgttgcgattgtttcaatagtttcttttgattgtaacaagcaagatggattatcacgtatatcaatctgaaatttatttaaaacatttgagattatgccttcgtcggttatatctcctggatttgaaatattttctaataatattttaatccaggtgctgagatcattattggatacagtattttcaactagatttctcttaataatagcagttactgttttcttcgtcataccctgtggacaatctggattggacaggcatagttcgattaaaaccttattaatatgcagattattttctttcagtattttttcagtaaatatctgaagtttttgttgatttttcagagagagtatgcatttaaattgtaccgttaaaagttcaatataacagttatctagatctgcaatactttctttatcgattttttcttttacctcggaagttcttctaaaagcactgatgtcttctaatacattttctaaagatagagttaattcttgtagtcttgacaaatcaaaatcagtattttgatttccttctaaaaagataattgcttttagtagtgatattctgtacttccaatattgaaaatgaaaacgttttatgaaagaaaattgattaattgggatcaaatcattaagttcagctgctaattgtacaagtggttgaattagatctattttattttcattatatccttttactgatatgttataggcaactgaagcaaaccattctacctcatcgacagaaattatttctttttcaaaatgtgtttttgttgtttcttcaaaagatctcctaagcttggaattgtctacaataaaatgtttggctttggttaaaagtttctgtaatattggcacattttgtttccagtttaaattatcattgtcaaataatttgatgatcagctgtagtgtgtagcgtagtaattctaataatggaatagtccaatcatttacttgatttcggtcagtattttcttcttctaaatctattttttcaaatagaaaatttataccagttaaaactatatcatccattttcttgcagaaagatatagctaaaattaagatttgaattgaattatcagattttgatagatagatatttttcaagcattctgttattttgtttttttccgcgaatttatagtatattttcaccaacaacaactgtgtaagaggatgtagcttatcacattcttccattctttcatattgttgtagagctgcttcataatttccacaatttatataggatgatataagcgcccttaatatttttccgatttcactaaagtcatcacaaaataattttttaatagctaattcataaataaggcaactgtttgcatattcttgttttttatcaaatttcttggccaaattccagagaatagttacaatgcatgatattttcattctagaaagtttttctacagcattggtttcaactgttttaaaaaattcatttagagaaagagtaatatccttgattgttaaatcctgtgcttcaattgttaaaaatactcttgcaacaattaaatcttcccaaatcttagaatgttctttttgatttaatttattaagaaaaatgtattccatacagacaatagccagtttagtattactttttgacaattgcccaatgcattctaatatttgttcccagtgaagagttatatttaatgtagtaatcattctcattataatttcttcaatagcttgatcactgtttccagtttgttgagtttggttgtatttgatggctaatttatatggttcgattttctttccaaaatgttcctgtaataaattgagtagtgaactacattcttcagcagcagaaagctccttgcagttttctattaaaaattttgttaaaaataaagttactgagtatttgatattttgataatttatatgagatgatagattttctaatggaagatttaagtattgtaacgccaatcttagcagcgaaacaacctcttgttttttcatagtgttgtgacaatttttcgagtaaattaagacagaattaaatattattctgcataactcaattaaacatttagcatctagaatatctaagctttcgtttatattaattttattactatataactttgctgtttcaatgtctccatcttttaaacaaagttgaaagtttacaatgaaaaattctaactttaatcttttgatctcatatttttgattttcttcccaaatgtctgtcctttcttctactcttcttaaagtatattgtggtatgtcctgataaatatgaattaattcatcccaatcatgtttaactattgaagaattatatttgatttccaaagctttatccacatcaccattgataagacaacaatgggataggtaggattgtgtcaaacaatctacaatagtttttaatgtgtttacttggcaattaagtattctaagtaaggtctctgtagtatttattaatgcatcatacacagcaaataaactagccgaaaatagtttacaacaacacaataaatacaattgatctgtctcttgtatatcatcttttttcttagtagtatcatttggtaattttgctttagtgaaactttgttgttctgtttttaaagttattgaaattgaattccatagattagaagaagcattttctaagtttaaatatagttcgttctccaacattaccttagatgtcctgaatgaacgttcatatttatctgctatcggttgtaaggcctctaatttatttctaatttgacgtagatcttcattagttaaatttcgccaaccataaactttttgtgtcatccaatttgcaacttcacaaaattcattgagtgtagttttaaaggtggatgtgatttccattgtttttgatatgctcttattaataattcttttttttttgtactttttttttatataaagttggtttaatgattccaaacattttttggtctgaagaagaaagggagtattctttatatacaattatatttcacctgcgataacattatctctataccaattaaaaaatagccgccgaaagtttttttcagcgtatattctcttgaaaaaaaaagaaaaaaaaaaagaaaaaaaagaagaagttaattgtgtaatgcaagacaaaaaaaaaagtttatagcttagtgaaacaaaacgtctctattcattatccttacaaagacttgaatgaagttgagggttagatacaaatattaataatacatacacatctattttttacataatttgcattggggtgataaaaaaaaatgttgtggcatttgaatttttagatatggtgaaataagggtatcacaaatttcttttttcttttttattttattttcctgtaagcaggatattaaggaaagttatgtgtggtattcgggtattaattattctattgcttcattactttgaaataattgaacattatcattcttatctctatcattgctattgttatttgtaatatcgccatctatttcgatatcaaaattttctttatcacgtaaatttctaaaagttgaaagataagattcgtcatcacctagagtgctagtgtcactttgtaagtcaatttctcctgaaggatgatatatattcagttcgtgttcaagtttactcattttagattttttttccatagtatcccaacaattgttagaaatattattagagtctaatagattatcaatagacacatcatcaacatcttgaagtatgtttattgaatcattggaattggtatgatgggtattatagaaaaagtcatttttattaatatttttttgagggtgtttaaaatttccattactatatggtctgttaatgtttaataactttattttttcttttaaagtcattggtggtgaagttggacagtctggatatattggggttgaacaagaactcagtattagatctggatattgttgaatttgattttcaatgtatgattcagttatataatttgaatgattggttttacctaggtcaaatttagatgaacatctagaagaatatccagagataggtgtatcaatagaatgttttgaataatggcacttgggttctaaaagattcgataaatattggtttaatcctgttctaatggtgggtttactttcagtgctatcttttgtacctgtaattgaaaagcctgaattgcctgaacatgtggaaaggggtcttgataatacatttttagaaggatcaaaatcaaatagtacttttgtagataagttgctctcgtttatatgactatttaatgatattatagatgatacgtcttttgaagcaaaagaagagatggattctgacatttatttatcttagtcaaatctattttttattaagacaaaaaaaaacaatatttaaatcagattgtaattaaaaaatgtaccaaacacaaatgaatatttaagtagtagaaaggatacaaaatatctttttttgatagaatatttggtatttgttggtatactatattgtatttgtatgtatttatatatatatatatatatatttgaaaaagaaaaaatcaaagtataattgaatatataaaataactatattttattcagggaggggtagcaattgaacaaataataataatagtaatagtaatatacgtatatatatatatatatatatatatatatatatgttcaattattagctatacaaatttcacagaatcgtaaatcaaaatggaaattatcagttgttatatctttttttatatatatcggtggtatagattttatatatccttttgattctataaataaatggcatattctccgatactgtggaatttggataatcagatgatttaatatatcaaaaaaaaaagtccaattaggggtatccgtgtgacaatagtatcaattttacagctttagaattgttattttcgaacaatgacaaacaatcgtgttagaaaagttactgtcagcctcattatgtgcacagtgaggctgatcatacaaatatttttttgttctttttttttattctctccttaaagaattgacatcagtacaatagtgtctattgttgctaatttattaccgttacattattgttttatttatatagtaatgtatgggtctttagtattcgattgttttttttgtgtacattttattattagcaattgcaatttttgcatcactgttgagataaactgaggtatatggcaaaacaatacgcagcttctaagtgtgtcaaggtttaacaatacatttagtttgagtgtctattatatctggtaaaaaaaatagacgagtcatgtacaacctctattatattttcattttgacagactccttttaaaggtatttattaacaaccgattgtaattgaacctattgttatcaaaatctattctttttttttttttttttgaactaaacaatttggtctatgtataataacagcaccaataaaaattaaataacatgtaatcacgtaaataatctttgacccacaagcacaaagggttgaaaagctacgaatatccttcatccttactaaaactatagtgattctactaacgataaagtgccagaagaagtattggaatcttaataatgaataatataacaatcttgtattaattaggcatgcattcaagattcaataaatatgttgtaaaaccttattctgacattgaaactgttcctataaaaatgttcctttaacgatattttcaaaaaaatggggggagggggataaaccactcatgagattgcactcatttttaccttctactgtaattcttttaggaactgattggggacaagtcaagattctgcaccatccaaagattaatactttatgaagtcagcaatgagcttagagacattgattaaaatgatgaaataataaattatgtaatgttttcaattatctttctcggcctctactttaaaattttttcatactctcatatatctggttaaagttttactgtggttcagctaatcaagtttattgatactaacaaaatctaaaagaaaactgattagattatctattttacatatcaatattcataaaagacaagatggttcctctatttttcaaacttgaggttttctgtattccaatatgattgaatgctgttaatctttcaatagctggtcaatattctaaaggcatattgatatcgctatattatccaaatagaggtgtttactaaatatatatatatatctatttttataaaaataaggttaggtttgaatcacgttcttgtttataaaagattatattgtaccatcgaactagaaaaggaagaactaaagacttaatataaagaaagattttaagacaacaaagttaagtcatatgttttcttaatttattctgtaagctatgtattaactgtaagcaattaactaatataactattaaaactaaatattttattctggatattgaaaatctattcgatcaatcaatagatgctacaatatttagcaggttggatttaaaaaatggctgccaagaagttcctagccgtgaaaatgataaatctaaaactgttgttatcataactttaaaatactaaaaaaagaacattgtgtttttcattaaaataatgttcttttatattccaaaggtagacaagttgcgttttgaggacttatctaggtaggttttgtgtagtatttttagacgatacattaatctgtttcaaaaatgaagaggaccacatacaatactctaaaaaaccttcaataaccttaactcaaggctatctatctgcaaaaaaaaaaaagactaaatgtgaatttttcctgaataaaatcttattttttggttgcattactattaagcaaggtatgttatgtcatttagaaaagggttaatttattaagagttttttttgtccattaagggtttttttttaaactaagagagtaagaaatagacaacaatacagcaagaagcttttggcttgctggtaaaaaagttgttaaaggctcctaatttgaagctatttgatctttctaagatggctatagtagtgcttgcatatataagcagaactttatatggctacgaggtgaataagtccattagagaaaaaggatatttttgtagttgttcatgttccacaccaacggagacattatttaccaagtcaaaaggctttattaaaaaccgaccatgagtgtcttaagtttataatcaaagaaaatggcatttagtaatatctaatgagatggcgggatgatactcttgaattcaattttatgattcaatacatttcaggagtaaaagaatcaaacagatgctttttctcatctgaacaatattaatactaatacaataaaacggttcacaatagtagttatattatcttcattggataatactggggaaaattaggcatagaatatcttgatgatctctatttcttgctaacatttaattgattagttaactagaaagctcggatcagaaactacagaattattaccaaatatcgtatgtgctgcaaggatctaatttattattaagcataacctatctagttggcgtaagtcagttattctgttaggttccattaaaatgttgcatctctattcttaccataactctaatctagcaagtcacctaggttctaataaaatattctaaattttgttgagagatttctactaactaaatatggtcattacaattaggaaccatgttcaagtctatatcaattaccaaactgctatccatgtacagcaacttggtccgaatacaaatgcttctctcatcgtttcaatataagtatagtcattaataatattgactctgtgacaagcatgaaactcttagatagattggaatgtattttagtggttattgacagattaattaaatggttgtattggattccaactgttaagcaattcattgctactattgattttaaattaattttgaataaggttttctgtaattattatatctcttatgaaatcgtctctgacagaaataaacttttcgctagtactacttttgattgtcctattttacaaatctttatagaagagtctactggccttacccaaattttcaaaaaaagatgatacagctatttctggtgcttttaaaataaatttgatcaatatttataggcattgtaaaacacaatagtcatcagtatagcgtatgtacaacagaaacatatcttaagtaattttggtgtttgaaggttgagataatagaagaaaagctatttggttgttttttattcattaattcaagatactagttgataatataaaaaaagcttctggaaaatacattgactacgtatttttcgagttcaatatgtaaatttagttcttatttgtagtatagttgtttttagatcaatttttctataataaggtaactcataacaatttatcctaatgtattagtacttcccttgtttcttattattctttagctacattgtggaaaaagtggaaattgggatgtttctctcttttttttttaaactttatggttgtcttctgctagttttcagttcatacatgtagcattattattgttcaataatttggttagttaaaaagaggtagagttagtttctccgctgtttactgtatcttcaggaactctcaaggcatttattcctcgttttaaagtactttttatattttttttgtgtttttattctaagatttttctgtgagtttttccttagattatagaaaaaggtgtatgggtgtatcgcaataacttgcagacgttgtattttatccataattcttttgtttggcggctaacttcatcccactacaatctttgataaaagagtagtatgtaaaaaagtatatgacagtaaatttagaacatagatgaaactaaatagttacaaagtcaaaatattaatcttgtaaacatgtctacgaaccaattatttttgtcaaaacagaaaacaaaaacatttttagaaccagcagtggctatctcgtctgaacagtctcaaaaattgattcaaactatgttaacaatgtcatttggatgtttagcttttttacgtggtttgtttccagatgagtattttctggatcaaaggtttattcctgaaaagcactccaaagatttcgataaaaataaacaagcaaattcaatcaagattaaaactttgattagaggaaaatctcaagaaattgatttattattagattggcttgaaaaaggtgttttccagtcaattaaattaaaatatttaagagccctctctttaggtatttttgttgaagaagctaatcccactgatctgtatgaaaattatcttttcacatttgactacagtggaaataatgtttcgatgtctattaatagtcaagattcgactcaaaatggggttgccacttcgccaaatgaaataatagcccttaaagattctcgcaagatggttcaacagttaatgagaaggttcattataattacacagtccttggagcctttacctgatgaaaaatatttgaatatgagacttttatttaatgaaaatgtagagcaggattatcaaccgacgctatttaaagatgctacgttccaaccacgagctaccattaaaattccaaaaagcctggatctggattcatttaatgtgggtcaaataaatacaggttatcacggttgcaatttatcaattttatcttcttgccagaatgtgaataagaattatgatatgtctgacaatgagcttttagaagaccttcaagaaattgatccattacaacgaattattgattcttatacaccagagaaagaaaaagcaaaggaagattttttaaatagtcaacaaaggttaattaataatccaaatgaaaatatcaaaacacaagtaagtcaagtagcaaacaatttaggtaattttttaaattcttcacaaccaagtattttagccactcaaatagcacctgagaaaaaaataattgttaataataatgatagcaaagaattattaaaatgtgaatgtaacaccggcataggaaaaaatactgtaggagaactttgttgtattaaatgtggtcgtttagtacataagcaatgttatggaaatactaaaaatagtcgaattgagtgtttcacatgcctctataaagatactaatggagggaaattggaaaccacttcaaaacaatttcatgggcttatggtgttgagaaaaacatatagagttattaataaactttggggaaatcctccccaatcaatatctgaatatatggaaagagtatttagtaaggaagaatgtatgaaggaagaaaatattaatgattttattttttcccttaattgtttgttttatgattatactttacaggcagctccagaaaataggacagtttcgaaatataatattatatttgatatcctaattgatgtgttgggtattttttctggtgaccaacaaccatttatcatgaatgaaaagtataccttgtgttttcgtctagggaatagaagtgctaactctagttatttaaagatattgcccaaatctggagaagatattgactattggttgaaagattttgaaaggttggaaaagaacgttaatcgtcacctgtataatagtcaggaaggtataaagaacaaagagtgtaaaatggcttcaatagatactattaatctaaattctttagccatccaggatacagagacacaagatccgattcgaagtggtagaaaaaggaaccaactggatctgatacagtacttaaatactgaagagaattcattactccctgagacgtataccacgaacaattttgataactttgaagaagagagtaatacaaataaaagaaaaatcagaaagattagtatatcgaaaggaacagttaaaagttcttggtagattttatattctgaaaaaagaggtttttaatacattgcatatgttagtttaaattttgctgttgattgattttattgctgtgatatggttttattaaaaatgttactgtgattatgaggtatatatattttttttattcttttatatattcataattgacttatttataatcaaggagtctttatcctttaatcatttagatattttattgctgatatcattttcataaattttggatgtcttagtctgtacagttttgactattagttgaagttgaattatgaagaaattctataagttgatgattatcttctctttttttgtctactaattttgatatcctattttcatttgtttttaagatacttgaaatatcgtttataatcgatctctttttgtaaaaaactatgtcaccttctataaaaaaatttgattgcctttcattaaataattttgttaaatcatttaaaactatattgtatgctatgcccaatgactcagataattgactaattttaattttatccgatacactaaggtaaaacacgtatatctttgttcttattttttgttctatctcatctaatttaggtccaatgataaaatgtttttggacgattgggtatactttttgaaaccaaacattaaagaattttttaaaattaatgttcactaaaagatcaaataccatgtttgctagtgggaaattatggaacaataattgtatatttgccagttgtatgaaatttttatatttatttattggaattgttaataatgcagaaatcaatactatggtataaaattcatcttcaaaaatgaaattattttgtaaattccattgagatatatgtaaaaatccgctatccttgtcattaaaataaaatatcttttgaataacatccagatatttctcttgaagaaataatgaacagcaaagatatagtctcattctttgtactgcattaaataactcgggttgtgaatcgtaagaattttcattatcagagtcaagatgggtagtaatttcataattagattcaattttatactctaattcaggaatgtttctaaaatcatgacttaaaatagttataatcagaacgttttctaaccaatgatagaaataatggggttggtgacgatgatttgctttctcaactggaatgatattatatttcagaattatattcgaataatcatcttgaagaatatgttcaacgattaatttatcaatcttaatctttttatattgaatattaatagggcattgttcgtttagagtatttgttgatatattgtagttttcacagaatctttcgattttctctttaagagatggtaataagacaatcaactccggggtttcctttacgattttttgaatccagtgagatctttcttcaaaattaccaatattattttctactatatagataactctcttaagtaataaaactttttgaatgtctaatgaatccataaataaagcaatgtgtctggtctgatattatattagtacaaccatttagtgttacaaatgtttgtatgtttgtggcaatagctttatatctttagtatcttccccagttttgaatttaatgtctatgtttatttttctgtatgaaaggagcgagcattgtatgttaaaagaaataatattgagaactgaaaaataattcaatttgaaagagtaatacaactataatcttctagagagtctaatataaaaaaaatcttgtatgagcaaataggcatataactgtatgtatcagcttttacgcataaaaaatattatatctctaagaaagatgatttaataaaaaggaatacttaatgattattatcagtgtatatacaagtacttataagaatgtagttatattaatcatatatatttatctatgtacatatttccctcacctttgttttggtcaactcatttacttatttttaaagaaacctttcatgtcttctaaccaggagatatattcattgttctccttgaattcagaataagtacaaatgaattctgataattcttcattgacacctctactttctaagtatagttctaaagattcttgcaatccttcatcaagattcgaaaatggtgggccacgatacttcaaatcattattaaattgtgattcagcagtgtcatgtaaaatgtcagcagcagatttaaatggagtaacactgtcaatgtagaaagaacgatcttgtaaattcatcaacaaatcaaaggatactgcggatccattgccttcatggcttacgacaacagtaacattagcaaaattgtcgtctaatgaatcaaatgtttcatcattattatcttcagcagcagcaatattttcttctgtaactaggtcatcaaatggaaggtttaccacttgagccacatcgaaaaagacgtggacggtttcacctgaatcagtcttcttaacaagtttagcttcgttcttgccaggcgtttcaacaataaagaaattagatttttctaaataaggcctgaacatgtctggggattgttctgtagatgctaaatctttttcaattttgtattcagagttcagaatatcgttgacagcttgtctttgttggttgtccctatattgagtagtgaaaaatgttcttaccggatgaaaagtagaagcaatcaggcctactctgttaaggggctgtctacaagaagtagctttaactatattagcaattgttgatttggctattgagcggtgtaaaatattcaatgacatgataataagaaattgtggtattgattcctgagttcttagtgctacttatgaacaggacaccaaaagatttagctgttaagtgagctgtagacatacggtttataaaataaggccttttcttttcttatttctcattttcatattctatttatatatttctttaaattgggattttttttgtttttttcaaaaaaaaaatctttttctatctagaaaaagtaaacagaaaacacccacacctttaaaaacaagaattcagaaggtgtcacaaattggacccatgccgttttcaaacgttgtttagtatgtgatgattcaagccttagctttaactacagattttgttttggttaattttacaaactgttagaaatgattgttttgacgcaaggcttcggtattaaaaattccatcagcgttcgttttaaattaatctaataagataatataacttataataggatattggtgatatcataagttctcagctatttatagtaggatactagtggcactataaattgttattgtattgcttaccctgttttgttctacatacttaatatacattataactcattttatattaactcttcctttatatactgtcataaaaatttccagttatttagtacgaggacgttagattattaattatatctcagatctcatttcagcaaattaattggcattttatgtcaattatactgagcaattcctcaaaaataaatctataacatttaatacaaattgaccagtcaattctgtcttattcacctaatcataatattgtaatatgaaatggtcagattcttttgtgtattccagggaagcgcaaacaatattaacagttattcaaataatcgaggcagtaatcaactatagtcgataatataattactaaaacggtcttatatattgagcggcttatatcgagccaatatatttattcaaagttacttaacttgttacttgcttgttgttctctttttgttcatatataatatataaattatttacaagaaacggttatggaagatgatcttttatctccagaaaacgttgtccttttatatgttttctggagctcgatcgattattcagattagtacattaatgacttgactgattcatcctaaaatttattacattaatttaggtgcactagtggattagaactgcaccccaattctctaatcatggtgattagtaatacacgtgggacttattaaaacaataggtaaattctagatttgccaaaatcttatgtaatccaatctctttattatgcagcatctaatgttgtagcacgtgtacggcttattaagacaataattagttctagattcattcaggatcttatgtaatcttgattgttataactatcctattccacaacacttgatgttgtagtatggtgtggtgaagtcctttgtgtattccagggaagcgcaaataatattaatagtaattcaaataatcgagacagtaatcaactatagtcgatagtataattactaaacggtcttatatattaagcgacttatatcgagctaatgtacttattcgaagttccttgacttgttacttgcttgttattctccttttgttcatatataatatataaattatttacaagaaacggttatggaagatgatcttttatctcctgaaaacgttgtccttttatatgttttctggagctcgatcgattattcagattactacattaatgacttgactgattcaaaccctaaaatttattatattaatttaggtgcactactggattagaactgcatcacaattctctaatcatggtgattagtaatacacgtgggacttaataaaacaataggtaaattctagatttgccaagatcttatgtaatccaatctttttattatgcagcatctaatgttgtagcacatgtaaggcttattaatacactaattggttctagattcattcaggatcttatgtaatcttgatggttataactattctattccacaacacttgatagcaaattttgggcacgtggcgcagttggtagcgcgcttcccttgcaaggaagaggtcatcggttcgattccggtcgcgtccattattttttcccatgcatgatttatgtagtgtcactttgatctacaggaataattctgctatataaaacatataatattcttggacatgaaatgtaatgaactattttttggttgttatgcttatttgtataatatataaaccgtactttatgtaaaggaatacactgtaaagaaatgatacatccatatattttataaatagaaaaacctaagctattgtcggcgagtaaagggtttgtaaaatcatctacgatgatatctagcaaatatctgtcactaataccttaagaaaaaacaaataaacaaagaaataaatatacggagacgatcaacatcattaatggtacaattttccagtttcaacttccaatatttaaactctcttagatattgtaagcagccgttaacttagttttatctcttttctctaattgttgaattaaaaagaaactgtcacagtttgtgctcctatgtatattttttaaaagaatctttctgtcaggcttaaaatttctctatcaggacacaaccttataagtgaagatttcttttaaacttaaaaatctttttaattcttgcaagtaacttattacttcgcaaaacaaatctaaaataatacttctgttactaactaaatcttgaaaaattcttttaagacctaatatacaataattctagcgtgatctgaagtattatattctcactttgaaaagtttattttatcatcataaatatcaccacctgttcacaattatgaatatctttttgtataataatcgttagtgatctctttaagagtcgtaatagtcaaaattcaattttctatctcttatccttactagaaaacttttttttttcgattttattaatctataattccaaacatctttaaataacatctcacccttaaacatgatcaactggatgttcataattcactgagtgacaaagaacgatctataaacgtgaacttgttatatgacagtatagaaattggtgtatcttttattaattagactctataaaacaaataatattccataatagatctattaccgtgacttttacaaaaagtcacagtacctgatataaatattatagtaataaatattcatgatactccaggaagaggtggtgtccacagtccttctggccattgtaatacaccagcatttgtataatcaccatgattatctacagaagaatcgattctcgctctagccactctaaaatataaaggtattgtattatttacactattttccaatgctttttgaaccatttcagacaattctaaattattttgaaataataaatcaatatcgattgttgtattcgaacccacatacacttcaaaatcatttaataataaagaatatccatcaaagtatttattagatatctgtgtctcgctctcggttacatttgcatcaatcttccatgacaatgaatgtggcatacttacattgaataacaacgttggaggtagtaatgaagcgccagcctcacctcttaataatgcaaaatcagtctcaacaatgcttgcaaaatcccattttgaaactccagataaaatcagcccaattaagataccttgaaacatatatgcagacccacccctagtagcacagcctggaactaacataataccaaggatataatgatgtaatcttaggttaagaccaggaattaatgataaaagtatcaaagagcagataaatgtaatatatatcttgaaaaactttctgaatctcccggatttccataaggaatatgcttgaataatagcacatgtaaatattaccccagctattgttccaactgctgtagctgcaccaggctgctctcttaaatcttttggagttagtctgtctacaggtagtctatcaaaagttacattattcataacacctaaccataagaaagggtaccaaagtaaaattttacacaagggggaaccaatttctaaagttctcttgacagaacatttccattcaacatagagtacaaaacataagggtaataacctttgaaatccaatgcttaataattcatatccagtctctggaaaatgaggatctgccattattggggggtcgaatgataaaaccaaagtccaatatccaactatagtaacaatccaatacccaataatacttttgtacagataaaatacaggcaaaccaaataatatattgagtgtaatgaccaaaaatcttggatccacacaacctgatgatataccattaagaaagtcgacaaaaacataggagctaggaaaaaatgaatcaaacttaaccgaaaaatgtgtattatgttttccctcttcagaagggaagctagtttgaaaacctcgcatattcacctttgcacatccaccatagataggtgaaataatatctgcgtggacagctgatccacaaataaatgagtcacccctatatggttttgacaaggtcatttcgttgtcatcaggattattatttcttccacctccaatctcataaccttgatattttatccgttgatcacctacattaatagctgaataagtccatccgccacgatcacataatgcaggacatctaatatagtagtatttatcctcaaaaggcaaacaatctcttgcatttaatccacatgcattatttttacctttccaatttaaatatgaattacagtcataagtatatataggtattttagtactaccattattaaggttaaaaaatggtttacgaaagagataggcgtgtaatatagtgtagataatactgaaccatataatgcaatagaagattagtattactatttgtgtgctcattttaggaaacctctttctgaatattttctctggaaattcatcaatcttcttcaatagggtaaacttggaaggaaaagttggtggattatcactcggttctcttggtccataccataatttgtacacaaatctttttaaaatgctggactgttctaataataaccaatcctgatctctatttgttggtatagcctggtcagaatatacagactgttgtatgtcatttaaaggctcatgaacattttccaaatcatttaattcgatatcactgtttgaaggcataatgtttggtctatttaaagaatcattccccccctcatccatatcaagttctgacgtctcaaaacataaatacaataaaaatttattttagttcatgagtatttattatgtttatcattaacaatttattgaaattattgcgaagtatttctatgttttttcgatcgtcttcttctttaagttcttttttgttgataattcttgaaagaagctttcctatttaaacgtgaaaaaaagtaaaacaaaatgatgatattaagtccagacatcctcacattgcactgagaatgaaaattttgaatgaaagaggtatgagtaatgatagataattattagattaacacttttcaatttacaaaattatatacgtatataaattctacataacggagcaaaatatcacattcaaatattctagacttgaacgggctcagcaatagctataggtgttatttgatttcctaatttttgagtagacatttcatttggtgtttgtaaatgttgttcctctaactttaaattagctaaatccttttcaagtactggttcctgtagtgtagctgtattttttaagctctctgtgtagcttgtaccttgtgggacatatacaggacgattcaagttggaaatatcggcgactttgttcattgcttgtgcagctactttttgatcaatagtgaattggattgcagctgatgcggcttgtgttctcaaatagtacatacctgtcttcaaaccctttttccaaccatagaagtgcatacttgtaatcttacccattgttggtgcacgtaagaatagattcaaggaatgagattggtcaatataaattgaacgatctgcagccatatcaatgattgttttctgagaaatttcccaaacagttttatacaaatcttttagttcttgtggtacatttaaaccttggatagaaccattagcagtaattaaatgttgtttcatagattcatcccatatacccaaatcaactaaatcacgtaataagtaaggattaaccacttggaattcaccagaaagaacacgacgttgatacatgttagaagtgaccggttcaaaacattcattaaaacccatgatttgagaagtagatgcagttggcataggagccatggttaatgaatttcttaacccatgttccattatttgttttcttaatgagccccagtcccataaaccaaatggttctgcgttccacatatccatttgtaagatacctttagaagctggacagccttcccaagattgataagtaccttctttttgagctaactcacaggaagcttctaaagacgcgtggtatattgtttcaaagatttgtttattcaaggtccgagctccttcagattcgaatggcaaacggagcagcatataaacatctgctagaccttgaacacctaaagcaattggtctgtgcctttcgttggaatttctagcctctggtacaggatagtagttattatcaatgactctattcaaattgacggttaccactttagtaatttcatgtaatttatcaaaattataagtggaagtcttaccatcttctgagaattcaataaaggcaggcaaacagacggaagctaagttacagactgctgtttcatctggggaagagtattcgacaatttcacaacataaattggaagatttaatagtacctagatttttttggttagatttggagttgcatgaatccttataaatcatgaatggtgtacctgtttctgtttgagcttctaagatagagtaccataatttatgtgctttgatggtagtaccacgaccttccttttcgtaacgttcatataaagcttcgaattcttcaccatagacatcagatagtcctggagcatcatttggtgagaacagtgtccaattaccattagcttctacacgtttcataaatagatcaggaatccataaagcaggaaacaaatctcttgctctaatttcttctttaccatggttctttctaatatcaatgaaatcaaaaatatccgcatgccaaggctctaaatagattgcaaaggcacctggtcttttattaccaccttgatcaacataacgcgacgtattattgaagacacgaagcattgggatgataccattggagttaccatttgtaccagcaatataggaacctgtggaacgaatgtcgtggatatgtacaccgataccacctgcagttttagatatcatagcacattcctttaaagtgtcaaatataccttcaatagaatcctccttcatagcaactaaaaaacaggaagacatttgagattttggagtacctgcattgaacaaagtaggggaggcatgtgtaaaataccttaaagacattaaattataggtttcgataacagagtcaatatcatctaaatgaatacctaaagccaccctcattaataaatgttgtggacgttcagcaaccttcccatcgattttcaataggtaagaacgttctaaagtcttaaatccaaaataattgtaggagtagtctctatcatagacgatagtcgagtttagcaggtctttatgttccatgacaatatcataaacttttttagaaatcataggggcatgtttcccagtggcgggatttatccaatgatataaatcagcgataacttgggagaaccgttttgtagtttgtttatgtagatttgaaatagcaagtctagcagctaaagtcccataatctggatgaatagtagtcatatatgcggctgtctcagcagctaaattgtctaattcagcagttgttacaccttcatagataccagaaatgattctttgagtcactttcacggcatcgatatgatctgaatctaatccgtaacataaacgagtaattctagatgtaattttatcaaaacgaactggttctttacgaccatctctcttaatgacatacattgcgacaataataataataatagtagtggtagcagtagtagtaatactagtaatatcttttacaataaaaaaaataaaaaataaaaaataaaaaatgaagggaaagggaggggaagagtgggaagaaaaataatatatgagaacaattagacaatcttaatagccttcttaattgatgctgtcttctatttatgataaataaataaatggagatgtctataacttatatagtatatatgtaaaagaaaaacagaaaacatttaaaatatttctggttcctttatagatttgaagggcttttatatatgttttttttttgtttcgaaagtaatattcaacaaaaatacacaactgagttataattaaataaaatgtgaaatcaagtgaagtgaagttaagtgaagtgaagtgacgtggggtggtgggaaggaatgtgagattcaatgacaccaaaatacaagatatgaatataatagtcgagtatataatcaagtgatagtaagtaactttgaaagaatatctgtctattttctactcagaaaggaaaattggaacccagcactaggttaaaataataactaacacaataggccatattatccttttggcgttgctatggtttcccaatttacgcaaccaacataatcgctatagcaacgcgttatttctcttttcttttttttctcatcgtttctttttttgtttgtgagcgttaccataggaacagaagaaaaaaagaaacgatgagaaaaaaagaaaagagacaaattagattgaattattagtggtatcaattactacaattagaaaacaaggtgaacgtatcgtttaacatggcaatttttcactcaggtgatcggcacactaattaccattattactggcaatatcctgtgtcaatatctgtggctacttcatctataacttgattaagtgaattatgctttgtctccaataaataaacgaaaaaaaagaaaaaacaaaagactataggataaacccagttggttattgaatgattactcaggtatatgtttcttaagttggttctgttttcttctttttttccttttttcttttcttttgacttgtttattccttgactagcctactcgcaaagatattatacttttaggtatttaaatctttatattcatggttcttaaattacataacttattcattacacatgttcatgttttatggagtagaatttaatagctaataagtctttcttctgcttttctctgcctttttctttttttggtggagaggaagaggaaagaagtattatttacagtcttaaatggtcaaaattcgagcttgatgtatgtatatacctagttcatgtttaggagtaaatttaacaatcaatattcagtcatcttatctatattgtcccagaatatttgcaaatactcacggtttgcatggcaacgctgttttaatatggaatcacttgtattttgtaaaattgattctaccattttattattctctacccattgggtaacattatctaagtctttaaaatgtgattcatattcttccttagccgccttctcagcatatggatctagtcgcaaattgtattcctttttatctggtctatctaggtgtttatcgactaattctattttcattttatttgcctgctgctcacaaaatttgatcgctttatgtctgacctcccaattcggatacaattcttctttaacaaaagtgttacagagttccaatttctcaacattggttgatccacttcgagtataattattaattttagctttaatagtatcatcactttgatgtcgtagtgtccttaaaaatgaatctaataaacttggttcaatacattgatgtctagttaatgttatttgtgaaactgtcttatcacctgtagcaaaatttagattatattctttaatattttctgaatctatagcaggtgcacttaaagtaatcgaatcttccatgacttgaagaaaataactgtacttaaagggataaaaatttgattgattaattgtcttcttattaatatcaaaatgttttaatgaatttttttttcttttaaatttctgtaatctatacactgcctatgtatatgctactattgaacccttcattagtcaatgaatcctaatattttttttattcttctcactacttaaaagcatccctctgttccatcatttcaccttgtaaaaatcctcgaataaaaaagttttctcaagttcaaaaaaaagttaaataaaataaaacaaaaagaataattttatacatatacataaacatatatatttacagatatatatgactccctatttatattgtcaaaacagtgcctatctgttcaaattccaaaagatccttttacaatgtcttttccagtttgttccatagcatcattcataccttccccaaaggctgtagcataatcattaaattgtgattccaaagaatcccactgtgtctctagggttcgagatactccttttaaaataccatatccactactcctcccaacatgtctcactggtttgacataatgatgttcggaggattccatttgatttccttttggtttatctcgggacaatgtaccctttgcaatttcactctcttggtatttcgataaaggtctctttgagccaccaagaacttcatctaattgttcagatgtacaatatattgtgcctcttgcccattgtaaagaatttacttgtggtctggctgatatccttaaatttggattataaagtttactatcatcctgcaccaatgattgtttgttcacagttgatactaaaacaacctcatagtcatcagttcttgcaaatatatccccatcttttaagacagatgactgcatcacatattttgtatggacaggaattggtgaatgcaatgttttaacttcttttaaatcttgactgtttaatatcttaatactaccatttgttaggtatacaatgacatacgatttaatcttaaattcatttttagaattttcataagatgcatatgataggccgacagatgcaatattatgtttaaaagatttaacattttgctttgtagaatttaatggtacagttctaacgtcatgagaccctattgtaataatgcttcctggtgttaaatcaccttttgttaaactttgcatcttcgaaacagtagcttcacaactgaacccagtctcattagctatcgctaaaatctttgaaacaggcgaacgatccccagtcctgataacatccacattttcaacataaaatctaccaccagcagctggtaaaattttattgacaatcagttcaccacagtcggtgccgcacaacattaagatgcttgaataattgtcattcctatattgtagtatttcaaattcaatactggtaactacggtacattttcttctaacaagattgtctaggttttctaaataaataatagctggaccacgtctatctatcaccgttatgtcaccgttggcataggctatacctacaaaccctatattactatgctgtaaagctgttacactacctcttcttagtcggataacacatccgggcatgataccttgtctagtgtttgatggtgatctatcccttacgtcgatcaagggctcattgatatcttcaatagaaaaacgactgaaactgaggtcaagtgatttgtcaactttttcaccttgtggatcaaaaaattgatttacctcatacttaaacaaaacaacatcaccattaactgcagcaacagccaattctagagtttcaggagcaaaagatattttatctatactaacatcgttagacctgttcaagattctagaaatattaatttcaaaaactgcactttcatccagttcattagcgcatgcatcccatagtcttacagcaccattaatgtgaccggatataaggacatttcttatattttttactttaagacccttcttattaactataccacctcttaataaaccatcatatttagagttgcttgccatcatgcccagccataatttacttggtactgagactgctgatgtagtagttgcatatggtctacatagtgataaattttgcggtaataatgacgcttttgaagtatataatcctgaggaacttaaaagtgtgtccatttctccattttctaaaaggactaggatgcaagaggctgcatgacctccagcaaaatatggggatgatgtagcaatgggtgtgatatctactatggatgatttgttaataatagggcacattttttcttgacgtgtgtttgcataatatttgctcatggcatcatatgacgtaacagaatataaaggtgtgccacctaaatcgacaatgcaaattccttgagatatttcatcatgatgatttgtagaggacgatggtcttgtagcaattatcagggatgtatactcaggattatgttgacatatccaggctactttaaagatctttggtacatatgtatttgctttgttgaaatcatcatctttttggacagcgttcacatttgtttcataaagtgtccttgcttgtataagtttacctgtattagcgtcccaaaacaccatggaattatcctcgtgaacagttaatatatgaagagaattgggatgatataaagattgtattacttttgggatacgttctcgacttatatccgcagtaaaatcaccaccaggtgcataaggaggaattttgtaaataaactcttgtttagtaataccttcaacaaaagaatatgtaacagtaacaagttcataagatattagtattgttccaagatctcttggattccatgagatagatacgataggagatagcgggatctttgtgaaaaattgactcttctgcaaattttcaattttaacatcagagaactggtttctatcaacatcatagataataatagaaccactttgtaagcccaataagatccagtccacagatggatcagtttcaatacaagtaatcttgcttggacagtatacagtggccagtatttgtttagaaaatagtgagtatattataatagtatctttattgtccacaatcaccatatatatccccttaacaaatttcattgatttaacagtggtcttattattcaatgcaaatataatctcaatatttttttgaccaaatatatgtattttggaactacttgtagccactgccattaagccttgagtgtaatcatagactacattggtgattttacctttaatacctagtttagttatcagcgatgcatcaaaaacctttaattccgtattgtttagagtttgttcctttatggatgtagaaacacttttaaatgtatctttgtccaattttggtgtttgtattttgaatctatcactaaatttgcctccatcagtatctggatcacttttactaccagacagttttggtgatttaaaggcattagaaacctttttaaatgaacttcctttaaacattttgtgtaatttatttaaatccaaagtggaattaaacgaaagactgtgtaaaactgttttatttatttaatacaataagtatagtatgttgttattgttgttgtctaatatgccttaaaaaagtgtgaaaaacttaaacttttaattctttttttattcccttgatgatatgaagagtccctatttataaataatattgctcaattatttagtcacttcagtagcatatttgctttaatgtttctcattcaagataaagttaattgaaaaagagttatatttagcttcttcttcttctactacttcttcttctatttctacttattttcaacaatatttcggtttacgatttcgccattaaagaaaagctcaaatcaaaccaaagacaagagatgaacctccctagataataaacgaggctataaaacacaaaacgacgaaaaggcatagagtatacaggcaccaccagtccaagcagttttgaaaactaaccttagctattacacatatacatagatacacaaacatacatctatacaactattcaactcaacaagcacacaactacagttacctatcattcaactaatcccctctaagttactgatcaaacctttgatacagattgaagttagaaggaaaatattgaaatatatatatacatgaaaaaaacttgtcagactaccattcccacccacccaatattctatcccatccacaagagatgtacatagaaagggtaaagatcatcgcgccaattaattatatagacccaataataggtctgctcgcaaccggcaaaatcaaatttagtttgataatttaaaatattagatggccgaaccgctaaggattgcggaccaagctaatgtttgcttttaaattgagtaaatttgaagtctcactctcgggtaggaaggctatgcgactcatcaaccaagttggattcagtgacttttttgaagagccaaagagtgacgattcctatagaaatgatcctactgtcgaaggtgttagtcaaataaatccattaaaaacaaaaaaaagtcattctatggaggctagttgcaataaagaccaggaaataatgcacatttcattgagttcatagttgatacttataaaagtctgttacaccagacttgaacttaacaacaaatacacattattataataaaaatttatgggtatataacatactgaagtacgtcgacggtctttttaataagagggaaaggaaagtaaaaggaggaagggaaacaaagaagaaagaggagatggaatggaagacgaaattgtgctttaccaaacactccgtggtctttatatatgttttctgtttaagttgttggaattgcttttcttttctgttttctcttattcttatttttttggtttcttacaaaaaaaaaaattttcaagccctcatcaaaaaattatcagaggagggaggaaaaaagaaacgagattggcagtctgagggtaaatttgcactttttaatttctttagggcacaagaagatcctaaaaatttattacttgcaatccacaaaagtattgttctgcagacaaagctgtaagaaactacagttatttccaaatatatacttattagtataatactctaatgtaagacataatgtttcccagactaagaaaaagcaatggatatatgatttatatatttatttttgctgatcttataatagtgtctaatagtaaaaaaaataatacatgcaggaaagcttatacaggtttcaaaaaatgggtttataccattaggtgtaacgtgcaaagcacttactataattcaagatcatcaggcatgaatgagaatccccgaaattcctcttgttgagaagtagttaatactgatggtattggtgttagcgttggtggagcagacgtgaattcttgttcgaaataagaagtgtcttctgcagacttaattttggggatatatgggggctctactcttaaatttaatatatcatcaaaatcaatgttgtggaagaatgactcttccatcacttctaatgcatcacggggaccaccaccaagacgatgtgtagggtcctttgccaataaaccttggaatatttgtacaatatcaccagccatatcaatagggtacaatggttcatcagttaagattgcattaaatacttcatcctcatcatcaccagaaaatggtgattgacataacaacatttgatagagtagaataccaaaagcccaccaatctactgcccttgtatattcttgatcctttaaaatctcaggtgccataaactccggtgtaccacaaaatgtagatgttttgctaccataccacatttcatccttacataaaccgtaatctgcaatcttgatatggccctcaggcgtcaataatatattttctaattttaaatcacgataaattataccattatcatggaaatattttaatgccaataatacctctgctgcataaaatttcgctcttctaacagataatctttgattttgaacatgccacattaaatcaccacccccaataaattccatagcaaaatatattctattttccgtttgaaatgaacagtataaattggttaagaaaggatgtttggtctttgttgctagcaaaaaaacttttttttctgttcttgcactttcgatatcgtggttttgaagaatgctatccttttttaatactttgattgcacacaatctattagtattttttgatttagaaagtatgactttaccaaagttacctttacctaatacttttaaaagaataaaattgtctaaagatactttacgacgtttgggcacttttcttctatgttttgtaatttgttgtgattttattggtgaaacctgagtgttctctacattatttgaaatttgtaatagcgctgtatcagtggaaacagttggagtaataatttgttgttgttcctggtggaatgtttcattattcatttcacggaagggatttgattttatagtggtagttgtagaattaatagtagaatggtaatcgttttgatgatggccagtttgtgattcaatattcacatcaccttcactaattgctttatgaaattcattatattcttgtttaattgccatttctatattatgattctttttttcccataatgcatcttgttgttgataagttgtttcatcttcaaaaacagtctccttattattaaaagttattgaactaaagtctgagggtagtttcatagaaattggttcatttttatttatagatggatctaatgtttgcacagttgtatcagttgaagaattacctgcaacagcattatttgtgaaatttaagtatgcctcattactctgattgtattcatatgccttctcttgaattgaatccttcttatttttcgacgatagtctactgctttctatcaaaatatttttattatcatcattatgatcaattgaaaaagacgaagaaggtacattccgatcagattcttctgtaagcatgtcatatcttgaaagtctcttttcttccacattcccaattttgttttttgaagtttctctggctgtagtggtcatccacgtagatgtttcagaagaagctggaagtttcttcttcttttcctgattacgttgagtgtcttgaatagttcttaaaatcttatttgccatttccatagacatcccacagaaatcaggtactaagtgagcacagtctgcatgacacatgataccacattcgctacatttacgaaccttatgtttgctccatggtaaaatgtaaccacagtggcaacaccacttggtcccacgattaggagaaggctcgaatctgtggggaatattatgatttaatttggtctcttcactatccgaatcagtagttgtcttggcaatacactttgttacaacattggtgtaacatttcttatgacataagaatttacaatcttgacattggaaaccactgtatcttaaaaattcaccacaataagcacaacacataatattgtaaaaggatttttgaacgaagtgatgaccatgttgttcaaaaacctcctcgtttctattaataattgcaccatgacgatgtaacccacctgcatgatttttccttgttgtagagtctgtcttatgaaagccaagatataaatgaatttgacctgcaggttccaaaataaaccattgatttactgttattggatctgtcaaaacgtcattgttctgtgaatgattattagtggaagtagtggtagttattgaagggatacgagtatcttcattaactttattgtcctctaaaaaggtgttgatattatcaggagcaaccttggatgctttaacccaaccttgttgaccatttgtttggttgactttttttttacgaatttcttcggctatgtctgctaattgaagccacataacagcaacaggtgttacaacattattaaccctatcatagatggttatttccacttcattacttttattgacttgtatttgaaaatcttcttgccatctatcgttccttacaggttttgatcttgctttaataacgtcatcaattttaacagtaaaaaaagtttctggagatctggcaaacattggtgattgaatatggtcaatatccctaatagcagaaacacggagtgttaatatccctgataagggttttcttctaaacttgggttgcgaaatatttaagtcttctgtatcatgatgtttatattgatccaaatcgacattaatggctttatacttttttaaggccttcttaagcattaatattctatgctttgactcaaaagcacctccttctgcagcagaactactacgttcatcaccatcaatctggtatagtttcgttaattttgtatttgcttcctgatattgtttttccacgtgtagtttaaattctaactgttgtaacatatattgaattctttgagataatgatggacaatcatatttaattaaatccaatcttgaaaaaacatgttcattaggtgaaacagtagaaagataaccataatttttggttttttctttttctccactgtctgatgattcatttttactggagtctactttcatatttttcatactgtttaaacgcagcttattcagtgtttcttgtaaatactcaatattttgacgggcttctctaatgtttgtattacatcgctgaataaccattgtattatttgtttttttcttcatattagtagcaccttggatgatattctgttcaacagagatcttccgctgaatatcttgttcaacttgtggcaatagcattgtaataatattgaagtatagcaataatttatcgaaattctttttgtttggtctatttgtcttgaatttttgtgtttttcaacactatatcttcctgtactgtcaataaatagtagacttaagtccaatatatatatatgtgtgtgtgtagttgtaaaataacttatattgtcactatcaaatgctgaatactcactatcgaggcatacacctattaaaaaggaactaatataaataacaacctttatttctccttttgtaatgtctattgatctttggtatttattagttttataacaaaggagaaaaaaataaaaagaaaaagaaacaatggttaatcttatatcaaaaattttgtgtaatattatcaagcaaaaataaattgtccaaaggaagcttattcgaactcccttgactgttttaaatgtgtttttaaatcaaagaatggcttctcaagtacttttttttttcaatcctttacttattttgtaaaaagaaaagaaaaaaaaagttgatgtaaatttttttttattatggagtatctttggtatttccaaaaagggaagaaggatgaactttttttacagaatttctttttaagggacaaaattgcaaaaataaataaatgaactattttattatagaaaggctagtaataatacaaactacattttcactttaaataacaaaaatcaagcaaaaacaacttaatatatttgtcgctaatactatcagttactttatgtatcttatctcattttgaaaaatgattttttttacgcttgacgagagatttccatcaagaactaatattaatttatttttttttgcatatggcaagtgagtatcatttaatgatatactataactgataatgatattagctttcaatttttactttctacagagaatattttaaactatggaatgttcaacttcttttttttggttttgaaaaaggttgattaatgctttatttactgctatattacagatattagaggatatagtactatgttgttgtttagtaaattcttcaaaactacttggaaaggtaaattatcgaattttttccattttttttatctggatgggttttatttgagacgcacagttgtcctacagcttgtttttgtaaaaaaaattttttttgaaatttcataaaaatatgaataaattgaatttattaacagaaatagtaacagtaatatttgtatcattaaagtattattattatttttaaaaagctataactaagccttttaaacaataagtttgaacttttttcatccttatcttcctttttatatatattccttgtaaaaaaaaaacaaagaaagatgctttcagtttaaaatctgttctttcgagttaaaaatgataagaatattacattaaaactgtatatagaaatataaaagaggtatcctcaaaagcattattgaacttaatttaaggctaaattgtatggttcttgaagatagaattctttcatttgaaattactttttgttgattttaaattgaagttgctaaaactaaatataaaatttagtttttaaaatgcgaaaagtcatctagtaaaataaacaattttcaagaaaaaagtcttttgcttaaataaacgtattatataaactgcagattattaatcatttatgttataaataacagatatttcccagtgtgtgatacactatctaaaacataaatcttatattctactacccaatacaaaatttccactttattttgtataaaaaaagattaaagaattttatcaaattacataacatacacctgtctaaaaaattcgatcattaaattcaacaacattttcggtgcatccttctatgagaaaaaatatcttaagaaatttgtttttttcttaatgttatacaaagtctcttctactttgtattactaataactatatatcctaattaatcatataccaaccaaaactcacactcacaactacaatcacatttttagtaatatattattctaatattagtacttattacactggcaattacagcctgctgttggacaaatattatgtcttgcaaaccattcttccgcatgtccagcgtgcataccatgattacacgtaagacaaaaactaaaccactcatttaatctcatttttttcttatttgtcaactccacatcagtagcaattgaattgttgagtccattatttttatcagacattgaacgattctcttcttgatttgctttaagctcatattcttcatcttgttgtctttctactccattaataataaatggcaaatttgaagtacccagtggcattaaacagatggcacaacgtggaaataaggtaccacaatgtggacacgcatatctgtgcggctctttttgagaaccatttgaatcagtaaatgtactaatttttctctttgaaactgctaataatcctttggaagtatatccattcttcttcgtaactggattattaatgttttttttacagttaatgcattgaatatacaattgtctaggtttcactcttgttttaatttctccagaactagttgtggatagttttgttcttaaaatatcaaattttgaacgcatggcaaataatccccatgaattaagcatttccctgtaagattgtacccattcatccactcttttgtccttaaagtatctaggtgaaccaaaagatgaaattaacgcagctgtttgaatatcactagttttattcacatatgactgcaacaaatcaataccgtttggagtgatacctgttaagattaaaccttctaattcaccattagcaatgactgatgatgatgtcttttgcaaaaatgttgttaaatcattatcatttagaaatcgaagtgcgacaccaagtctctctcttaaagaaatggcttgttcatacaaaacatcataccaatcattatctgcaataaaagcaaatatggctcgaagatatgggttctcaagttcagaagccatttttctacattgttctctccaagaattattaccaggttggtctttataagccatataccctgcaatcgcagtggcaattaattttaatctttcacttttagctgatcctagaatctcaactgcttttggaatatccccaaaaaacattgcccatgccgcagccttttcataatggccattattgataataattttatacttttcttcataatctgactgtgacaaatcccacccagatattatcatacaaagttttctttgaatatgttttgatgaattaggaaaattgggcattgaacttatattttttgtagtagctttattctttttccgcaattttattatcttttccatttccttttgtagttgaatatctgtcaaacttccttctttcaaatatctattttgattagcaagaccttttaacccactccatataccaataataccttcataccctaaatcaagatcccctgagaccattgtaccgtcatccatagaagcttttgcaatggccaaccatctccatgtatttctaatgtatgcattattttgtaaaaatttggattgatctattaaatctacagttttcattggatctaatccatatcctaccatggctctctttttcataataacactaatatctttttgcagaagtctttcaggtttccaaaatatattgtaatgttcatcttcaaacagattatgtgattttgtatcatgtccaaacgtttctaaggattcattgctttcagattcatttctactgatataatcttcagaagtttcgttttctgaaaatgagctggattcatctggaatataatcatcatttattcctaagtcttcaaaagataataatttcattccagtagaaacattttgtagtgttgatttttgaatatcttctgtaacaacaacttcatctatgatcggtgtttcacaattggataacaacaaagaattattaaaactaaaagttgactttgagtaacattgagtgattggcattctatatacagtcccagactgtctcatgcatataaaacttgctccgcgattgctttttggaatgtaatcaaatgtagctactctgtcaaatgttgttgggacatcatgtactgtagagacaaataaattttccattactatgccttgcccattggtatctatggttgatccaagtctccatcgttttattatgtcacctctatgtaatgtagaaaattctctattctgtgctgaggaccatctaaaacaagagttcatatactttttagatgctgcccctgcaccaactaatctgtcaaaagttaataatggagtagccaaatttaaatcgcctggccccattttacctgataattttcttctatcccaaatagctaaagttccatcatctccatacgtactaaattgccatgaattaaaaggattcaatttaatatcataagaaagcctcgatggatgttgataaactggtgttttaactcttaaatcaatttctttaagaaattttgtactagataccaaaagactaatatcatttaaaaattgcagagatgcgattgattcattaacaaaatactcaaatgataaattaacaagatcctcaccctgtttttgataattaaaatcccatacttggagtgaagtatcttgtttatgcttgtccaaacccatagcaacaaggccaacattatttatcccaattgcatttacacatcttctttgcttaggcctaacagtcaacaatgtctcattcgcaagaacatcaacaatttttacatacccatctttctcacctacacctacttggcctacttgtaactgcgaataatccaaacatgtgatattggtaaaatcttttaatgtatttaatttagtgatagagtcatctgattccaaaaagggatctactttataatgtgtaacttcatctcttgtcggatttacagaaaggtaatctaactgatcttcttgtgaccatgttgtaacttttttaatcaatcccatattttattatggagggattatatatttaaatgtcttgattaaaatatttagatccctgcctagtagatcaacctatacaaagtcaatcattatcgtcacaatcttttttaatcgaccaccttcatgatactttcaatatcctgcatattatataaaaaaattaaaaaaaacaataatgcaggagcttcaaaaatacatgtaccgaactttttacatacttaaagaaaagataaacacacacatagacatatatatatatatatatatgacaatatgtgcagccagaccaatattattattacttggtaatacgcataatgttacaagtatatctgacatataacatttatatatgtgtatagttgtatatattttctactaaataataacacttattcactttttaaaaactgcaccagcctacctaaaacagcagcataccaaaaaaaaaagggaaacaatatgaactaatacatacaggtgtactctaacctcatctgatcatgaatcaaactgtaataaatattcagttggatctttattctcatcatgattaaacattagctttgcattatcttctgcctctgcaatatcaccagatagaaactgtttcaaatcatcagataccagtgggttatttccctccattttaatatgaatattatcatgaacaacacctgtatcattttgattattattcaattttgaaggctcatcaatatcacctaatttcagccccaaattatctattttaaccatatttttatccctttttatatcatcatcactattaatggctaattttcctaccattctttctaattcgtcaattttgtataataattgtgatcttttcttctcttgtgcttctagtacacccaataaaaaatttatataatctactgtcctattcaaaataatacctttatttggtttaatttgcttaccttttgcatcaaaacataataaagaaggaggtactagattacccaactccttaattttttgttttatcaattcccttcttcttctttccacagcattatgaaagtctcttttacgtcgtaatttttcttctgtagtgagatgtgataacgattttggaacacttgtgcttaatctatctaaagtattatttccattggtattattattactattattatttgaggaatgtcttgattttggagttgtgcccataaatgttggttgtcttgaagactgagaaagataagtgttacttcttaaagaacctggggttgtaatgctggttattggggatttcaatgatgtgcttaaaatactggacgtattatcattcaatgattcaaacggttgtggattgaatgaatttgaagatggtgtcattatgtccgatgtaatacttgagcttaaagacgatgtaatatcctctgcatagtttaatacactatcatctatcccgcttatatgttgtgtattgaataagaaatctgtatttatggaaagtttgttgagtgaatgcggttgttgaaaacttgaacttaaattatcatttgatatacttgttgaaaatgaagggttattaattgtattatgtgatgaactaaatccgttatttatattttggaggtaatctttcgataaagattgagatagagccattccagagtcatttaaaaatgaagtatcgatatttttaacaacatcaatattgttgttattcatatcactattcaaatgacttgtggtgaacatatcgtccaagaatgatgcaacatgctcattactatatgttaaatggttagctctcataccgttattattattattattattattattattattattattattattattattattattattattattatttatactactcatttgtctctgatataataatctttcatgttggtgtgcaggagaaatatgattaggatatatattttcatgattagtgttattagtgttgatattgttgttctgtaatgtattaatatcaaattttaaaaactcatgtatatcttctacatttccagataatatatcatctttcttcttactatcgttatagtctttattgttattttcatctgatgatattatattcttggaatttaactgtggatatgactcaatatttaaaaaacttgagtctcttaaaaatgaaaccaaattacccgatttattctgtactacagtgttattattaatattactctcattacgaacagaactagtgatattaaaattcataatttcttctaaaagtctgtgattatcatcaacgtcatgactgatatgtgagacatccattttcactcttttttattaattaattaattagttaattgattatcgtttcctttctttttttatacaaaaaaaaaaataacttagttaatcttagtatgcaaaaaggaaactctagcaaaagtagtatataattataattgatttatcaaagatatggaatatttaaaatgcaaaacaaaaacaaaacaaaaagaaaataaaggaagatatataataattctaaaaaccactatgtttgaatatagcctttgcagctgttgtttttatgagcacactctaacttgggactgacaaaacctatgtattcaaagatatactgctacttatctaacatatattttacttttccaaaccgcgatttgtttctttgttcgaactagcagtacatgttaatcatcataacaaacagtacacctttcaatttttaaaaatattccatccaccgttaaaacaagttttacgacactgatcatttttttctcgagacaatatctttttttcccgtgtttcccgtatttttccgtatttgtatttttattcccgttttttttttgttcctgttttttcttttttttttttttgtttcaattagcaccaattttctcgagaacaaaaggaagttaaaaaccgacaggatacttttaattttgttcttgaatcttgccagagagaacgcgcgttcgaatgtctgctgggaagtaaattgagtcgttgaaccctagggtttggttgtgctgataaattagggcgagtatctgaattttcaattttcctggttcaattttcccatttctcttcttttctgagaaatgaacgccatttataactttataagtcgagtcaatctgaacaaagattaaagatgactatttgaagagcatgaaagtatgtacttattctgttctttttttttttttgcttttatttttactctattataccatagataataatgcagctaccaaaatacacaaacacttaagtcactccttcactctggtctccctttacctatataacagtttaagagtgtttgatattattttttttgttacctattaccactttttactagtccatctcctctcttcaaaatatggcaagtgatgctgatgcccaaattaatcaattacgtgagtctttaggtcgttggaatagatcgaatacaacaaccgctagtacatttggtgaaaatgctagatcatttttcaattcatggtcagattcaatcactgaaagagctaatgacatgtatcaaagattaccaataactacacaggatctccccttactgtcacagaataataaccaggatgaaccatcttggtttaatctatcacgttgggaacgtatcacactattcatctgtttcctactaggttcaattgcatgcttcacaatatgtgtctttttgttccctgtgttagcaatcaaaccaagaaagtttgctttattatggactatgggaagcttgttattcgttttagcatttggcgtaatgatgggtcccttcaaatttttaaaacatataatatcaagggaaagacttccatttacagcatttttctttttaagttgtttcactactctgtatttcgctgctattcaaaaaaacacaatccttactatcatttgtgctgccgtagaactagtttcagttctttattatattatatcctatttccctatgggtgccacaagtttaaggatgttaagttcctttggaatgaatactgctagaggagctttacatatttgagtaactacagcctaaaaaaaaaaagaccaaaaaaaaaccaaaaggataaagctaacaaattaacgtgtgtatagatttgtatgcgtaaataaagtacatatatatgaagacaatagagagtgtacaaaaataaatagaggaaaaagaaaaacaacataatgtgaacaaaaaaacactgtgttctttaagtatttattgcttcgtcataatttggtgggtcagataatgtctctacatcactatgtgaattgacattatcttcaacaaaatctctagaagtggtaataggtgcatattgttcatcattatcatcattgtgatgattattatcattatctttgttcatatcataatctttcttaaataaagttggagaatttaatacatgatccaaattattaaaaatgagttcacccccacttgcataatttatttgagtatcacttttattaacaaaatcattatttgtggcattttcattattattattattattattattattgttattagcaacatcattatcaccactaccattagtattattatttatgttgtttgcattaaacaatgacgttgattggggaatcccagagggtccactaactgatgtcgccctagataaatttaattgctggatgtacaagttatctggatcatatgatgccataatatttggagatccaataggtgatactagaggtgagttaggaactgagattgcttcttcaaaacttggtggtaaagcaccatccataggatcatcactaacaaccatatttttattagaattcgagactccatcagctacaacactgacagtattagaaatatcgacacttgaagtagccatatggtaggtaggtaactccatattaccactgttacacatttctgagactaaatagattggtgtatctattattacttcataatgtcttagccttgaaggatctcgcggatcaggcttactaattcttaacatgatttctagtttatgtcttgcatggatattactgaaatgcatactatccagatacaaaccacgcttactttcatttaatctagtatgaaatttaacttcaacacctaaattggatttgatttttgtttgatgaaacctccggtcaaagtttttattattatcttgactagatccaactgtgttattattttcacttttgcttgaattattatcaatttggttattgtgactttgattttggccataaaggtgaagatgatggtttcctgtaagaatgccgataacactgctacgacgtaagctatcatttttattgttgtgataatattctggattcgggatcattgtaaaagaatcaattccatatggagggataattctagcctttcttttatcaaaatcttcaaacttagggaaatccaaaatggtctcaatagtgattggttcagtgattccacttgaggtgttgttcttattattcttactgtttctactagtatcgtctgaaatagttgagtaggccattagattatcaccaactgcattctctataatctcctctcttatagctcttgcacctttttcctttgctctaatttctagcagaggaagatttctttctttacgtctcttcgcttgaaaatctaaataatatggattgtacggatcctttgccactggatcgacttgatcatattcatattccaaatttttggatacaaaagtaatcttttcattaacacttactctgattctctttatgcaaatatttttttctaaaggcgctaatttaatctttattgggacttgactattcaacgagacatatttctgtgcaaaagaaatttcataagataatgaattagtccatattctattgatatatattggtttatttgcagtagaaactgagaccaaaggaggggttctgatgacattgattggatattcgccgaaaagatggtctttagtcaattccatagatggagagatatgaagcggtcctttttcaggtgatgatgagatatgatggaatgaatttttcattctttgaaagatagctggcctatttttaatcaattttttaggttgtgctttttctaattcggttttattcaaggtgatacacgaatctgaggatattatagggtcatttgcaattgtggtagggactgttatagatattcttgatttaaggttttcatctgaatgttctctattcttatccattaaatcagtagaatttgagtgtccttgaattgtacctactttcaaagaataattgactcttgcagacgggtagtacagagtctctggaacgtggttactgaagacacaaggtaagataaaaatgtattcaccaggctccaacagttcttgttttgtggatgtcatatcttggaagaacatagttttagttcttttcttatctacatagtatcgttgttcagtaggtatcacagtgacgaattttctcttagtactgctatcattatcattatcattatcattatcattatcattatcattatcattatcattattgttattattatggttattatctgtattattggagcttgtgttatccataataatggaattattggtatcaataagacaagttggtttagatggattcagatcccatttcaaggatatacatttatagaattcctcatcaaaggtttttgacggaggaacaccattatgccaaaacaattttattcttgaacacaattctacgtgtataggagacaataaatgaatttgtttctttagagataatataagtgcaatattgtatggggtcattgagctatccaattcatcattttgaggagaattaacagaattagagtgtatttctgaggataaatcatttgtggagatattactagtgtttgtattattattattattattattattattatcgttatttgataaagtattggaatctaaatcatctattacatcattttgaatattaacattagcatcaagaaacatatcagtatcattaaacccattcaattgcatcaaatattcatcatcattagaagatatagtgggcagaaagacatactggccggttgtggcaatggatatagataaatcctttaaatcgttttcaataatcttcctcggattgataaacccacgagacaataagaattgattcaatatattattattgtttttattagttgtagaattagtcgtatttgttgtgtcagatgatttatccgaacctattgatcgattagataaagaacctgtagtttttaatcgagaaggagatacgtttttcagattttgtgtatcttgtgatttgagattggtggaaccaaaattagaattagaattagaattagaattagaattagaattagaattgaaattagaagtagaagtagaagtagaattatatttagacttagaattagatttatttgaggaatgagaagttgtatgattaatactagatgttatcgatggagataaaaaagaagatagcgcatgtttaacagagaaagaacctcttctttgtgaaggtgacgtcatttcttgtgcttattgaaaagtcgaatactaactagttgactaaatatgttgatcaaactattattattggtaatgtataatgggatgtggtcaattagactttgtgttttataaatagtgctaacagtaaacgtaattttatattttatattttatatatatgatataagtaatgtattcatatgtttctttgaagagatataataatttctatttggttttgtagtaagtagatacagtaaattacatcactcatattcattacatgcattccctgaactatatcttactagttattacaacaaaaaagacaggcaaaaggtaaaacaaaaaaagaaaaaaaagaaaagagagaaagagaaaaagaaaaagaaacaaaaatggaaaaacctcaaacgaaaactgacaaaaatcgtagggttaaaatgaaaaaacataaattttattagggtcatgtaagaaacaacttaggtcattaatcaattaattaattaaaaaaaaatgaacacaaacaaaacttgacaaacatccatacccctacaaaatcacatgacccaagcacccatacactgtgtttctctttttcttttcttttttgttcgtttttcttaaagaacaagcaaaattcgaccaataataattaagccgaatatttttcacatattttgttgttttcaaaaagaggggaggggaaggaagaggggggccacacgaacaaaagaagcaaacaaagaaaaaaaaaagaaaagaaatctaaaatacaccatagaaaaaatttctttggaattgagccaaaactcaaatcccgaaatccaagaaacattattggtctaattcttaatcattttgaaaaaagcatgaattcattggaagataataagaacatacagttctttcagcttcatcttcatggcttcttacgctgtgtcttttttttttttatttatgcccgtttgaagtccacacttgatgaattatttggcaacgcattgacacacccaccacacatccaccaaaactcctttacctgtcctcgagcctctccaagcatctctctattctttacacttatttccctttctctctctctctctctctctttttatttatatgtccttgccccattgacgttttcttgcaacttggcgttctttcaataactgtatgctccaataattgtatgcgatttcttctttccaccctctcgaacttccctatactacttttatatattattaaacttttgtgttcgaacatcaatatatacaggctttcttgcttattctctctatttttcttgtctttttttctctaattttttgattcttcggttctttagttccttttaactctttaaccctttagttctttagccttttctttctcttttaatcccttcttccattatcaaacttctcctgttcacataacctgtacatacttctttccatacatacgtacatacatacacgttctcaaataataataataaaaaaaaaagaagaacagaaaggagttttgcatataacacagtttataagtaaaaagagttttgttcaaataacgacaaaggacaaaccacataagatcatataaataatagtcctcaaatatactattttctttttgttttattttgtatttatttctagtttagtaagagtggaaatacaataaaacaaataaaaaaaaaaaagagatcattgaaaatattctttcattttgttttttttttttttttttttttaataacagtttaatatagatagaatctctacatcttatatttattagaactacaactatttgaaaaaaacattaacgaattatctatttattccccctcgaattgtgattcttttcttcctttctttttttattttttcttttactcccccctcccccccttccatcaattattactagttaaacaatgcttttgaacaagatggtcacttctcgtgctttacaacatgctaccaaattggcagccacaagaactttctggtcccgtgctatctctttgtctcaaagatctatggttcgtaatgcctccactgcatctggtagcaagctaggtccaaccgaagtctcttcaatcctagaatctagaatcaagggtctagctgacaaggcatctcttgatgaaaccggtagagtcctagctgtcggtgatggtattgcccgtgtctacggtttaaacaatattcaggctgaagaactggtcgaattctcctccggtgttaaaggtatggccttgaacttggaacctggacaagtcggtatcgtcttgtttggttctgacagattggtcaaggaaggtgaactcgttaagagaactggtaagatcgttgacgttccagtcggtccagctttgctgggccgtgtcgtcgacgccttaggtaacccaattgatggcaaaggtccaatcaacaccaccgagtttgctagagcccaagttaaagctccaggtatcctgccaagaagatctgtccatgaaccaatgcaaactgggttgaaggccgttgatgccttagtcccaatcggtagagggcaaagagaattgatcattggtgatagacaaaccggtaaaactgcagttgccctagataccatcttaaaccaaaagaaatggaacgatggtgcagacgaatccaagaaactatactgtgtctatgtcgctatcggccaaaagagatctactgttgctcaattagtgcaaactttagaacaacatgatgccttaaaatattctattattgtcgctgccactgcctctgaagctgccccattacaatatttagctccattcactgccgcttccataggtgaatggtttagagacaacgggaaacatgctttgattgtctacgacgacttatctaagcaagccgttgcttaccgtcaactatccttattattaagacgtccaccaggtcgtgaagcctacccaggtgatgtcttctatttacactcaagattgttggaaagagctgccaagatgtctgacaagtgtggtggtggttctttaactgctttaccaatcattgaaactcaaggtggtgatgtctctgcttatattccaactaacgtcatttccattactgacggtcaaatcttcttggaaactgaattattctacaaaggtatcagaccagccattaacgtcggtctttctgtctctcgtgtcggttctgctgcccaagtcaaggctttgaaacaagtcgctggttctttaaaacttttcttagcacaatacagagaagtcgccgctttcgcccagtttggttccgatttagatgcatctactaaacaaaccttagttagaggtgaaagattgacacaattattaaaacaaaaccaataccaaccattatcagctgaagaacaagttccattgatctacgctggtgttaacggttacttagatagcatcgacatcaaccgtattgccgaatttgaatcctctttcttatcatacttgaagtctaaccacgaagaaatcttgactggtatcagagaaaagggtgagttgactaagggactaatggacaagttgaaatctgctactgaatcttttgttgccaccttctaaattatctagtctattccaaagagaattaaagataatcacatcataattgaggtacgtattgtttttatattacctctctccctccctctcccccctactttctccttttcttctctattcttctcttttcttttctctgctgagattagtctgctttttatcccatttttatttttttgatttaacctacatcttacttttatttctattctattcttgtagtgtgtcttctttgtaagtatttaaagtctatatatatatatattttatattctctatccagtaagtattattattataattaatattataattataattattataacctatattattataaaccgtaacgatgatcatgatcagttgactgtttctttttttatttttattctttttacttatttcgttgctaattaatacatatatgtttctatttcttacccttaactgtcccataatctcacttcggttgacaaccttcaggaaatagcaatgtgactaacagaatccattgcttctgtattggtttaaactatcacctcaacccttttttgattatccctacagacccttgtaataataagtggattagggtttgctctccaaaccctatgtcaaaggtgaaaaacaaaaaaaaaaaaaagaaaaaagcacgatctcaattttaattgaaagatatattgctctaacaaaatttcaagagaagagtataaagtagtgaaagctagtgataggttttacgaaacatccagataatataaccttctctgaattccacaattacatatatgtattgaactgtaataaatattcatatacccatatatatacgtacaaaacaaaagaaaaaaaaaattaaataattgaataatggcatctcagctgttgccatcgtatggcaatgatgaaaatgatcaggggctatttacaaacagatctgttatgatggccaattttgaagaatggatcaagatggctactgataataaaattaatccaagaaatagttggaactttgctttgattgattatttccatgatttgaatgttttgatggatgcagagaataaaatcaatttccaaaaggcttcagctacattagatgggtgtgttaaaatctatgcttccagggtcgattcggttagcgatgagacagggagattattgagtggattggctcaaagaaaaacaaaggggaaatcaaactctgattctaattccaacagcaatattagtaatagtagaaataacgatagttctcgagggactaatttgaatggagaaagtgataataatgataatgcaaatgatcctgaaggtggtcttccgagacgttctgacatcaataacgatagtgatgttgattttgatgataatcgtgatgaagggaaaagatcttttagacatgcaaggatattagagactacactagtggaattcgatgcaattaaaatgaaatacttggaccaagaattaaatattgatcctctttttaaaaaagcattggttgattttgatgaaggtggtgcgaaaagtttacttttaaatacattaaacattgatccatccggtagagtcatatttgatgctactattcaagatggagttgctgaatctgataataataggaatgcaaatgaaaataataaccctgataatataacctctgcgtcagagatggatgagaattccaaacaggaagatataaaagaatcagaaaattcacatatatataatacgtctattattgaagatgaaatactgaccctgggcatggaatttcttaaatttaataaaattacggaatgtgaaatatcttcctcactgggtcaattaagatctttagtagatgatataaacaaggaacaatcttttattgagacaattaataataagagtgagaattttcttactgaacaagaattggcagaagctataccgacaaatgatatacctgatttaaatgatgatgggattccagatttagagtattcaatgttgcaagatgaaatggacgaaaatagcatcacaaatgaccctaatagtaatataactaccacagataagcaccacaacaataataatattcctacaaatccaaaagaagttgatgaagttgataatttgataagtgattcacaaataagtaaaaacaataatatatctacaatagttgatccagatggtacaattacgaacggattaattgaacaagatttgatggcatactttgatgaaacgatgaaaaagaattggagaggcagagaacattggaaagtccgcaatatcaaaaaagattttctacatcaaacagaaaacaatgatacgaaaaatagtataactgacacctctaaatcatcagaagaaaatcaaaatgctgaatctaaagataatgataaagtcatatcggacaataaatcaaaaacaggtgaaaaccacaatcctatttgcaacaacaaaaataatagtaaaaaaaaacaaccactggagttggacttttttaccttcgaagacgatctagaagacaaaatatttgtaaaaccaattaaaccatctattattgaactaccacaaagattaaggatcgaagattcgcattatttattgcctgatgattatcattttaccagtgaaaaaatagttagattgtttattaagcctgaacagaaaatgagtctatttaattcaagaaaaaaaaataggccttcaacaagatataattctactaacataatcaatgaagaacattctatgtctacaaataaaagggctgttacaggtgaagcaccagaaattgcagatgaaaatttctgggccgaaaactatagaagaaaagaacaggaagataatgaaggttacaatgaagatggagatgatgagaatgttaggggagcagaggtggaaaatccatttgatgaagataatgaaaatggtatcgatttcaatcaggcctttgataatggcgatgactttgatgataatgatgtctctgatcacaagactgaagaagatttgctgaatggggaatctaagctacaaagtaaggataaaaaaataacatttgctcgtgtagcaaaaagaatagatgtaagaaaattaaaaaataatgtttggaagtcgatagtaactttaatagcactctcaactgatgattcaagttcgacttttacccctggaaaggaaaatagtcaagatataattaatctaaaatttactgatatatctcacgaactttttaaaaggtatactgcagaaactttcaaggatatatcaactagtttccaatttatctgtctattacatttagcaaacgaatatggttttcaagttaaaaagattgatacacttgataatcttgaaatagagattgatagatcaaagttatcacatagttaatgaaaatttcagtaaatagatatctacaccataaaaccgcaaatgcatatatatatatcaatataaatacaaataagtcagattaataataagcatattaaatttccttaatattggaacattgctctcaataagaacaaactcatgattgaactatacatatcaatgacgttaaaatgttattttttatgtacacagaaacatacacgcatatatatatgtgcgtataattggtatctgaaatttaaaatacaccgatctttatttttactatttttactattattatcataaatgaatatataccattcgagtttttttcttacaagcgaaaaattaaatcaacttgaaaaaccaaaacgactttctgctatatagaccgtaccaactagtaggattagacgattatagtacattctgaaaaaatttgtaacatatcatgaaatatgctgctatttctgttataaaataataatgataacaattttaatgataaccatattaattattacccaagtgtttaatttatagtatttaaccttaacatagtgtgaaaaatattctattgttaaaccgatcatgacaatattcagggtatttaataggttttttttattacctactgcaggcatcacatttgggttcatcacatttgcaaaagcttggccggatgattcaacagctcttactttaaaggattcagctttacaaacggcaaaacataattcgagatatgaaccattatcaccgataatccaacgtcaagatattttggacaaaatttcgaaattaccattatatgagaaattgaagaaaaatcctcatttagaccatacagttcagagtgagaatattcccactggtcatcgtccatatcatgtaggacaaggtcaattatttggtccgaaaaaattagaaattgacccagtaatttttagagatgaaattaataaatctctagttgtattttaccatttgggatcggatttgagtaatgaaaacaacaagattcataagggtattttatccttattgttagatgaaggtctttgttattgtggatttccatgtttgccaaacaaaagaggtgtaacagcacaattaacactagatttcaagaaagatatcccttcagatacaacagttgtattaagagcaaaagtcagtcagctgaagggcagaaaatgtataattaatggaactttggaagccattccacgcaaaaatcttttccaatatatctgtggtatggaaccaaaacatggagatatctacgtaacagcaaaatgtatattagtggagcctaaatggtttaagtatttcagttggctccctatgttttgatgacaattcatatatacaaaagtaattatatactttttctatatttttgtatatgctttcgttagtgaatatattatgaatgtgtataattacaaatgtaagagagtgcattattaatgattaaaaaagtaatctaagacctttatataacaaataccactactatctcttaaagaaacgtcgtatgtcgtgttttgaagagtcatgattagttagacgcttcttttggacaccgtttagtttcaattttctactcattgaattgttttggttactacttctgtttgtcacagaatctttacccgcactttgcttaaacagaagccgtttctcaccaatcgacaagttggaagactcctctgttactccattcaaggcttcagacaatttaactgcaatatcaaaatcaagatgttcttgaaaatccttgttacaactaaattgcaaattacactttttacagtaaaatgtaatattctcatctttattatcgttattgttaatacttttacctcttatgtcctttggcgaactttcatacgtggattcctttgaattctcttcattgctaactttaaggatttgtacctgatttccaaacatatccataatattcttctgtaagtcaagaatatcaaaattggagatactcaaatttaaattgatcaaaggataaactcgaagaattttatctttgcaaatttgtgaatcaaattcatcaacaagcctcgaagcagatttaagcaaaccttgaccattaaaagctgaactcctgcaaattataggacccgattttctatacacttcaccggctgcagttttcaaaaacactgttaccgtgttgggttttataatctttttatactcctgctctaattcttcaacacggtacaccaattcactacaaaacacttcaaaccatgataatatatctacaagggaattacaggcatttcccctcatatttttattagacatcatagacttgactacagctttagggttcagggattcatgatactcgccttttattaactcatatatcttttttgataaggcttcagtattctcgaaattgaatttattatgttcaggaatgaaatttgtttgtttaatttcggcttcaataaaatcttgtaactgtttgctactatcccagttatctctaatgtacctgatactaccctttgagggtaattttaataaacctgataaagatttaccaagtgatccgcccatggtccaaaaactagtgatttcaaatttgccacagtccaaaaagtcattaagatatttattcaatattattgtttgggcgttaggctttttaaagttagatcctagtttagctactacctttgtcctggcaatcccacatgatgtcgtatatccaagtgtcttttcaatatacgttctactataatcgatgatatgtgaggcaagagcaaaaataacatcatcccaatcttcgatatttggtaattgagaattttgaccagaaaatgatgaagttagattaaatacattacctttaaacttaaccttttcgtttatatcttctgatatcataggtaacctagaatctaattcatatgtaccagatacaaaaatagttctaatatcttggaacactgaatagtcaatatccaaatttaaacggtcattgtcatcacttctatcaaataacaataaatgttgaaaacacaatcttcctaaatctagaaacatttcatcaacactagctttttccactagatcacaacactcctggaatatttttaaaacttttctaccttctcgtctatatggaatcaaagaaaccttatatgattctggtgataacctcttattgggattcttgttccatgaaccatatccatcgtgatattgccaaaaatcttctcccttcttaaatacagcagtatgaataggaaccaaacttggacacttttcaaaagcagttttcactgaatccattcttgatattccatattttcttgcggcgtatgaaaccgcaataatcgactgccattgtacacagactactgggtcgtctcttgagtatccacaccgaacttgttccacttgtgcaaaaaaggcatttagatcgacatgtgctatacatgaaagtggcgacaaatatgcctctgattttgaatttaattttaataggtccctccacttaaaatttgacattaactaactttagcctttagcatatagtttaaatggtctaacctggataaaagtgattaacagctccttatttgcattacttctcaatacttatttttagtactcataaaatatatatttagttattttcccctaccgctcctgtattgacatagcttttctctttcttgttttctacttccagcaaacacagatctcagaaacaaaatttctcaacttctttactactatgcatacgttaatattaaatgcattattatgcaaacaagaaatattcgaaaacatgcaccaagcagcgtcgccatagacgtaatagctgtcaacagggttatgcgacaacacaccatgcacaaataaattgcctgaattacatcctagctacaaaactaatcgcaatatactaagaacaagaacatggtgacatcaagtaaatatatttaagatacaagagtatcatgtaaaaaaaaggaataaaatagaggaataaaaagatatctgactcagtgaaagatggaccaatataatcacaaaaaagattatcttggtgagtaaatgtcatgtagatcttgtttgaaccaaaataggaacctaatatgaactggatcaagtacaactgcacaaatctcataaggaatctgaacgatactagatccactaggcaccagagtgttgtcaaacttataacaatataattatggagctttgatacatttcacaagcagaaaaaaaaagggaaaacaattcaattaagagccgacgaatttgaaagaagaacttcatacatatattcttggatatatgtagtcgtctccactctgtgttatcgacaactgaatagctctaaacatgtatacgatgatctctttctacacaataacttaacaaaactccggacaatacaaatatgacctatcaaaaaaaaaaaactggaattactttcaaagagaaataacaatactaaaaattaaaaaaagagttaatgacgtaaaaaagtgttttatcttattaaaaccttacattagttaaagatatatttatattgcaaaaagttttgaataataataaaatatgtggatgttttttgttgtgttcaggatatgaaaaggataaaaatattataatattgttttataatattatttagttttctggaatttcaatttcaccagcattgatagcttcaatgatatcatgtgggttcttgaaatcaacacgacaaccaacagattgagcagtacctaagatttccttagtaacagaagctaagtttttaccaaaggacttttcttgcatttgtctagcaatttcaatgatttcatctaatgggatgttaccgttatgcttgacattcttgtccttctttctgtctcttggtggttccttcaaagcagtgataactaaggaagaagcagatggaacaacggaagcagtggcttgtctgttttgaatcttcaattggacagtaaccttaatacccttgaattgcttggtagccttagcaatatcttcaccaaccttctttggagataaacctaatggaccaatctttggagctaaagcagcagaagcaccaacttcaccaccgacagctcttaagtataagtatttaacttcgtttgggtcgaattttggaggcattttaacttactattcgttgctcttggtcgactattcttataccctaaaaattaaagcacatatacaaatacacgaggtttatgaatgccaaacgaattaataataaaatacgttaacaatataacacgtctataaatttactaatatgtataatgcttcggttggtcagttcctgaatgatggtggacttcactacaatatcttgggtatctaagagtaatattgctattgagactggtatggagaaactgcataaattggctctgcaaagaattgttgtgctacacagatgggtggtagtaccattctgctctgtccacacctgggaagaacattacttacacagaacatttagattgacagccagacagctagacaggtgagtaagctcaaacagatagaggttattctggcaaagattagatagaggttctgatttcgcaacccctccttctaccagagtatccaagtaaccgaagagcctatagaaaattacatgactgttccacagagaatgattttctgtctggacaaattcaatgtcaagtggaaaagaattgaagtaaatcctaaccaagcctgtttcttttttgttttattttctaattttcccaaatccgaaaaaaaacaaaaaaaaaaaacagtggaactttataacaaaaaaaagacgctttctgggtgtatggatgcaacagtcatcatatatctagatcaatttcgtttgggttagactccttctcgctgctcctatcgttatggttattagaccgtttagctgaaacaaattgaatatgactgttttcttcacttatagcttcactatccactttcatactgtcttctagttccttctttaacgttaacatctctttatattggtctttgtcaccgtattgtacttcaaactgatcccaaaaattccacaaatttgtattaagagcaggtgccagtaaacgggcaccatagcgtaagatctctctgacacgcttgaattcccgaagatccatttctagcttagcgaatttaatgatatattcaacacatctagagtctggcgtaatcttctccacacattcttcataaattggtctacaagcttctgcacctaacaacaaatttgtcttatccaatgctaattgccatagtttaactttactgtccatgaagttatctgcaatcgatcttgctccatccaataggatattaatgccttgtcttgttggaacattcttgttaatgatttcctcttcaaatgtattatattttaaatagatcgaaatagtatctatttcgtgttgatttttcagttctgatatacaattatcaaataagtctctaatagattccttcttcattccagaaactggtatatcacgtatcacatcagataaatatttcatccatatctcatattgtattatgattgactgtgaaaataaattcagacatctttggtaaatcttataactctctagaggagcattagcactcacatttacaaaattagcataatttacaaacattaagggggtaattaatctaagctttactactgattcatatgcgttaacagtgtctttaacatttccctctgttaaaggtctgctttcaagtaaatctaaataatattgccataacttcaatgaattaaataatactgactgtgcaggaacagttttatgaccttcattaaactttgtaatgtaactttcaaatgactcaggaatctctaaaatatgaatcaatatattaagcgccctctcactaccaaatgtatttagttcattgttaacccagtctagataaacaatctctaagtcgtccaaaaatgggaaaggaacccttgttccagcttcatagatctccctagctgtatcataatcctcagtgtcccaataaattttaaggtattcacaccaaaatttacctagattgcctggttgatttactttcaatggactaatctttgctaaagcttcagaataaactttagcacggtcctccaaagaattcataatataaactctttctctccaataatcaatattattgatgttttgccttaactttaaatcattaatcatgatatctcttgaatctaatagattacttaattgtaccacatgcgtatttagtttggaattccaatcatctgaattacaggtccctttcatctcttgtaaaatagtattaatacacgcttgttcaaagtcaatcgagtaatcatataatgtaacaaaattttttaatgtttccattttggataattcttgaaccatttgaatactcaacgtatcgacatcctttctcttaatggagtgatttatatcaaatattatcaatcgtgcttgctcctttggatatttgtcctttaattcagctaataacttttgatattcatctaatagcgataattgatctaaacagtttaaatagattaaatatagagaaagtggaacttcaaatgttgtcaatttaggatttttgaataaacatttatcaaaacagaattttattctttgatggtcaaatgtttttgaaagtaacagaagtatatcattaatcctatcattcggacacactattaagtatctctctaagaattgggatgcccatatattaatggagttaattacttcactttctttgtaattttctttactgttatttagcttcttagtattcttagattcgactaatgctttatatattgatatttccaatttttctaattgtgatttctcagaatcatcattatcctcattattaagaatataatcatcgtcattattatcaccttcccttaacatagagcagacaggaattaatttctcttgcaaaaagactataagtgtttcccaaatttctgcatgttttactttgctgttgttgttgttgccattactatgactgtttctttgtaaagagatatcgaatgctttcctgatatgactcagattacatgattcaactgctaatttcaaatattggatacttattttcccactatctttaactttaacgtgttttaagcattcttcatgtagatctaatataaaatctgtgtatttcctattttctaccgtattaatctgaatcatccatgtaatgtattcactccatgggtctaaattattcctaaaatgattgacatatctattatatagccatattaaatgatcaatggttcttctagtaggatcaacagaatattgttttttccaggaatctagatatcgagcccaactcacctgttctgaagaatccttttgtaattcgtattcgaaagcaacatcctcatcgtttattatatatttgtctataatattttccataatcccatctatattcccttttctcgtttcttgtttgctgttgcttgttgatcttagagtacttgccagcttctctttaatatcttatatatgttcctcagcaattaacaaaacacactttttttaaatatgaaataaagaataagaaaattttatcggttatttggtgacagggtggtgcagtaccagatattgaaaccaacatagaagaagactgatgtaaacgtattatagatctatctaactgacaatcaatataccactaaacaatataataaaaccaaaagaattaaggaaaacccaaaacgttactgtcaaaaaaaaaagaaatcatttggagacaatttgacaaccgctaccatattctgaccttcaaaaggacttcaaaaaatgaaaaaacataactataatcactttatatattgactacacaacaaataaaagagacaactaccgataagagccattattgaaatatacacaaaacatccttacacaaaatgaagaacttacttttttattgaaataaatactgtagcctacaaacattatacactgtatattagaatctgtaaaaatcatcaagaatgaaattattgtcttctatcacccttttgggaacgttattaatatcacaagctaactcattcccctttggttggaagttagagaatctgaatccactcaactccaaagaactaagaactttacaaatcaatgaagatgaaataatcatcataccagaatccgataaattggatcttattagaagaggtgtaacatttatggatattacaaacgtcaaatccaaatggccctttaagactaaaaatgacaagaaaaatgacaaacctacaattcctaaatattcatacccaacaaatatgactcaaatggataagatcaccaacttaattgaacaaatagatatggattcaatgcatttgacattggctaaatttactagtttttatactaggtattataaatcaaagactggttatgatgcagctatgtggttgtccaaaagaatatctgaaattgtagccaagttaccacaagactttgtatctattgagcatgtagatcataagttatgggaccaattctctattattctgtcaataaaaggttatgaaacaccagaaaataaagtgatcatcggtagtcatcttgattcaatcaacttgttgatgccctctatcttaccagctcctggtgcagatgataatggttctggaaccacaacgaatcttgaagccctccgattagttgcagattatattgaaagaactggtaaaccatttaaaaatactgttgagtttcatttttattcagctgaagagggtggtttattagggtcattagatgttttcactcaatatgcagaaatgaatgaaaaagtagtggcaatgttacaacaagatatgactgggtatgtaatggatccaggaaatgaacatattggtgttgttacagattatacaactcaatccttaaccgaatttgtgaaacgtattatcgatttatatctaagtatcccgtacgtcgaaactacatgtgggtatgcatgtagtgaccatggaagtgctacaagaaatgggtatcctgcctcttttgtcattgagagcgaatttaaaaagacaagcaagtttattcacagtactttagatactttggatagattaaatctctctcacatggctgaacatgtcaaattagttttaggaactgtttttgaattgggcaattgggaatccttctaagagcacgaccatgaagaagaaaaaaagctatgaatttatatatccttacatacaaacagacaaactcacacctatttatacttatacatcgtttttatacataatgaattctttgctcttattgtatttattatatttttactattatctatcgatttcctttaattaattcaaggaaaaaaaagtaaacaagtaaacaaataaacacgtaagctgttcaataaaatataataaagaagttagaaacatactaaatttgtttgtcaaataatatctattcaccttaaagactatccacagaaaagggtattctccaattttaattattatgatctttatatatatatgacgaaataccaatgacagacttgatagaattttttaattgtcctacaccacagagactcaatcttttattattgggcagtatttggttatggtacggaatcttaagatatttaaactcatataaagttaacatttcttctgtcttacagataaagctgcctcatgatatgcatccgtctcctactaatagacaattgatccaaaatgtacaaagatttgcgttgaaaatgtctagacttatgataccattacatattactacattatttttattccacagatttcaaaataccaccgatagtaatgagcaatggggtacattaccatttttaatgcttcatcttttccccttatgtcaattattgttgttggtctttttcattgtccaacaatctgtaattaccaggtatgcagttaaaagattgcctcttattgaatccaaaccaactcaattgagaaatgtctacattttattatctgattccttaacatcttttacaagaccattaattgattttttactttttacacattctttatttaatcgcccacatactgacattgatttattattgtcttctttaccatccttcattagaatctttcaatgtcttcgagaataccaatttgttagaaatttatctttgttgggtaatacattaaaatatacttgtaatttaccaatcttaatctttacgtggtacttaaggattcatcctgaaatgttatcttcatcaaaatttaaaacctttcaaatgttatttcttacagttaattctacatactcatacctatgggatatcaaaatggattggaatataccaagttttatttcattaagagaaggtcataataaaatggtttttaaaagatatacttattattttgctatactaacaaatcttattttaaggttttggtggttgtggatttttttaggaaaatattcaaaatttgtattttttgatgaagaattacaatatttagagatattaagaagagctcaatgggttattttcaaattagaatctgaatatatctctagaccaatgccaaagtcgtgaaagacatatgggaaaagaaaaactcaatatatgaatatattttaaatcatctttcttttgattatattgtaaaagaaaatatgtagatatattaatgtttgtttggtacaataatcgtatatatagaaatatagatttatttatttataaattttttaaagtcatatgtatattgtatattctaaaatagtgaaatgttagatcgttctgcgaataaaatgcgataaaataaaaagatacgggagatttcagacaatcaaaataaatgagaatggaatactaatgtctatgcttatttctatatgccttcctttggttttcttttctttcgtttttagttaaatatctaaacctctttttctttttctttttgttactactactatcattattgtcaccgatgtctgtatcacccattcctaagaacttagcatattttttggcccttattaaactttgatttaaaactttttcagaggattctaatttcacattattaatctttgctaaatattcaaaattttcgtttggttccaagctttcaatttctactgttgtattatcatcatagaccgatgtggagatttgcccttttttcagtatagatttaattctattgccattgctatttatacgattgattttatcttcctcctcctcatcaaacccattccatgattctagatcactctctttttcatcaatatcatcattatctaattcttctccaatgtctgcttctaattctaaactctctttaaattcacacaactgttgttctagttgttgctttctttcgtcacgaatcttctttctctcttcaattttagctaatctattctgttctttgttaaattcacgagccttcttctgcctttccaatttacgtttatgaaatccggtaagataatctagtctagaatccttatcaaaagtcacttcatcagtaccaaatttctttgcttgtttattagcataactcttaccttttgtaagaatttgtctatttgttctaattgccattataacttgttagatataagccttctattcttctttttcttcttctttattcttttgtccttttgctcttttattttactaactttagtgaattctttttacaataatatagtatactttacagtctatagaatataagttatatgttaataatacgtaacaatcgctgttttacagaaaagttactaatcacttttatgtttaagcattctcctataatataaaaatgcgatgagctaagttatttttttaattttttttatttatcaaaaatttaaaatagtaaaaaaaatattttccatcttacaattttcgagacatttttccggttgtgaggactttcgaattctaaagaacatcaatgataaaaaaggacattatgaagttaacttgagtgatcacaataaaaagttcaaataatatccattatataagattaaggttcacagtgagacattaaaattaatttaaattcactgggtgtgaatgtgtatatacataatttgagaaaagccattagaaagttggaaaataaaagaactacttggaccgtttattattataattctacctaattggatatattttgtaaaacaaccacatatagttatttattaaaattcacttttaccaatgaagaatttctacactattgatgacacgaatagaaaaaagaatacaaatggtaggagttcacccgggactggtaatttagaagaaacaccaactttttcaagtatgtggaagagtattccccctgtgtctagaactatcatattattaatgacaattctgacctctttaacttcattacaattaattaacataggttatttagttttccaatttaatgaagttttagcatataaacaatggtggagactatatactgcttttcttctattaccatccaatgcaatgtctgcaattatggaattgtataatttgggatctagagctgtacatttagagaatgataggtttttggtatcccgttaccatagtacgtctatcgattttgcattctatctgtttttttgttccacttttataataactggttgtgttatcatatatggaaaatatcaacctttggtattgacctgtgcatttgatgcatgtttaactttaacctgggctattgataattccaatgtagaagtcaggttctacgggatacttccagtctatgggaaattctatcctttattacaaggcctagtagcatttgtatttggtggggatttgattctgatggtacttggatttagtgctgcatatatatttaattgtttggatacaagatctttaggccccatttatggatctattgcaaaaaaagataaatggtatggtgtcgtaccaactggtaaatttcatgcaccaagatggtttatttggggatatgaatttttgtttggtgggaattatttacaaaaattagatgagcttaaatcagtcaataaaagaaatggtggtcaaagattaggtacttccacctctacggtaactactactactactactagaacattcggtagtggacaaagacttggtggatacgagacattgggatctgataataatattccaaaaagagattatctggctactagttcaagaaaaaatttaacaaccaccagggaaagatcctctaatcctcaagaaaattaatatatactatttagaaatgttcatatttatttttatgtatatttttagtgtttttgtttaagttaaatcaagaaatattctttttttacaagatcgattgatctaaacctattggtatttaatgttcttgtactccttgtaaatatcccttttaggaaattacacaattgtctcacaagattttaatctaaaacttgaaacattcttcaattttaccaaaacgtgattccaatgaatatatatacacacacacactttatgcatatatatgtggatacaaatgtagctgtaacattaatggcatctaatgataactttaacggaattcaactattgaaaatatgaattcctagtaataatcaccagaatcaagcgtgggtgaggaaacggaaaggaaaacgaaagcaacaattgtgattcaaaacattctttaaagaaggaataatggagaacagttctaagatatgtcagcactgtacgaacgatatatatcctgatataagagacaatgttcctcatgaaattgcagaaacatcttttggattaggtattttgtttggagttgcactgggctcaataccattccttcagttcaaacctttcaatctatacatcttatctctagcattatttcattttttggaatattatatcactgcaaaatataatccaaaaaaggtcaatagtcaatcctttcttttaaataatggtattgagtatacaatggctcatgttgtggcagttttagaatttttattagaaggatacttttgtcccaaattgaaagcttacaattcttctaagttttgtcaagtatttacagtaattggaataatatcagtagttgttggtcaattgataagatcattagctatgtacactgctggaaaatcattttcacataatattaaaattaagaaagagaaagatcatacgttggtaactcatggtgtgtattcatggcttagacatccaagttattttggtttctatttgtgggcacttggaacacaattaacattattaaacccaatcacatttataggattttgcattgttctacatcaattctttagtagaagaatatcctttgaagaacgtcatttacttgatttttttggtcaagattatgttaagtataaacaatcagttaagatatggattccatttatgtaaattttattgatgaagatagtaaatgaagtatgcattaatattacaaatacataaatagcacatttgtatgtaggtatgtacacttttgtataataatctataattagatggtcaacaatgtctacaaatttggtgaatttgtaaattcagatattaatagacaataaatagagcaagaattattctgatatgttgccttcggagagctgtctcttctgcggtactgcactatcattcctttcattagatttagaattaaatggaacaaaaattggtttttttgtaggctgtttcgatatgctagtatgatcttgtataggttgatcagtaaatttcaacggtaaacttggtaaatcaggaagtcttggtggttctgttggcattgacatataagatatggaaaagtttcttaatatatttgtattactatcgttattaaaatcggtagattttccaatatttttatgtatcactgatgatccactatagttggatgttgccattgacttatcgatactattttccaatatgctgtctgtattattaaatgttcttgaagaattgtaatctttactttgtgaacgaataggagtgatattggattcattaataagaatagatgatgaatcttcaattaaactaatatcgtcatccaaagatgaaccaatggcagcaagattatgatacgtttttgttgtcggaagtcccttgtaattgtttttatttaatggtgtactccctaatatgttaggtactcttccaagcactaatggagaaaaatttcttttgtcattgtctgcattttcattttcactatcattggtgaatgttatattgctgctcatcttagtacttaggggagtaaattctaattcagaagaagttttttgtcttttcaccgtgattgacgttgctaaattatcttcatcctcaagttctgattcatctgtatcgtctgaatcaatgattggttcccacgagccatcatttgataactgaacccgacgacaacgcgtgggaatttgttctaatatttcttcaataaattcagatacagaaagatcatcaaatttaataaattttgaacaaattggacaacgaccattctcaatttgtctctgggactccaaataccaaaaggcatcgaaacattctatatgggaacacttagtagatttaattggagtggttatcttagaaccagatattggacattccagtgatagtgttagtgacgtggtctgcagaccgaattcagtatcttggcttttagctagatagtatagtgttgcattccttaagatctttgtatgttgagtgatattgtaaactaattcatctgttttgattgcacgaacaagatagatagacatataatattccatggagggaacaaaatggaaagaaaattgtaatggtgtttggcccatacgttgttcatttgataggaggcttgtgatatcgataggtttatacttttgacttttcttactgtttgtagtagcatatttttctaaagagatcccatttctcatattgatcaattgatacgtttgagggaaacttatttgaataacttcatgtttctcattgtcgctattactgctactattactatcatcatcactgtcgctgtctatatcgatatttattggaatagcaccacaaaaaaagaaaatcttatattcattactttgaatacccttgtattgttgttgattcaattcaatattaaattttttcttcaatttcttatttgtgattggagatatataaggctgatccaataatttgatccttggatagaatgataattcaggaaaagaataagatattttattattgtggttgttgattatgatattgttgctttttgaaggatgttttgtttgagaagagattatctttttatgatctaagcatcttgaatttctttttctaatttcctcggattttagaagaggaaccgatttgtcattattattattattgtgattataattagcagttttagaataagatggagatggagatagagatggagatgaagacgaaattaataaaagagattcagtagtcaaattgtctattcgatattgaacgttctcaggaacaattttttttaattgataaagcatgaaatctatcgcatctttacttaaaagagaagagccgatatttgattgaatatggttgtttagtctatagattaagtcattttttaaagatgaattttcgatatcgaatcgattacaaatttgaatcaattgattcttcttcaatttaggtagatacgtacaatatagtagtattttctttttacgtaaccaacgaggctcaatactagtcatttaatattttgcgggattcatcaacaaatgtacagtctctacatcaaaactataatatcattcaaagaaggcaagtgtgagctaaaaagaaataagtcttaacatgctttctagtaagtcgaaatctagatttctaaccagctgactttgaaaaggacaatatacataaacgttgtccacataatactcctcctcgagaacatctagatcaagagtaaagagagagagaaagagagacaaaaaaagaaataaaaaaataagataagaagaaaaggagaagaagtcgaaaaaattgcatgcacgacctgtatatggataatatttgagaaaaggagaaacttcctgctattctttttcagtggtgctatatttgttgacttttattttatcaaaaccctaatatataccaaaaacaacgacaagtaaagtttgttaaattaattaccaaccctagtttgtttttttatttttttggacacagaggaaaacaaaaaacaaaaaacaaaaaacaaaaaacaaaaaacaaaaaacaaaaaacaaaaaacaaaaaacaaaaaacaaaaaacaaaaaacaaaaaaaaaatactttttgtaacatccactccggatccgtggatcgtggctttgttggaaaaacttttcttttgttttttgtttttgtttttttctcagtgtctgaaaaccagagtcaaaggactgttttactatgatggatcttaatgattgattgattagtggttgataaaaagtaaataggcaagtattggacatattatcgttatatctcaaaaacatgtagaattggtggctaacagtatgttcttatataattgaatttctcttacattacatataggttaatctctgttcttttctctttcttctttattcttttttattttttctttttttgtgtgtgcctgtcagtgtgtctgtttttttatctcgtgatatgatgataacatcaaatagagaccgtagtgaggttaattactttgtttaccctcgctttcattttcactttcaacatagctaagcatgtttaaaaaaatcacagttttaatctcaggatcaggatccaacctacaggcattgattgatgcacaagaagaaaatttactggctaatggaaaaatttgctcagttatctcctcaagtaaaaaagcgtatggtttaacaagagcctcaaatcacaacattccaacaaagattcattctttataccagtataccaaaaacttatctaaggatgataaagaagcacgtcaatcagcaagaaagcaatttgagatcgatctggctaagcttatcaatgaggatcaaccagatttaatcatttgtgccggttggctattgatcttaggtcaagaattcttgtctagagtctctaatattcccattttaaacttacatcctgctttgccaagacaatttgatggtactacacacgctatcgagatggcatggcagaaatgccaagattctaatcagccgttggttgccggttgtatggtccattacgttatcaaagaagttgataaaggagaacccattattattaaggaattaaagatagttcctggtaaagaaactctagaagaatatgaaaatcgtgtccatgaagcagaacataaagcaatagtggaagctacggttaaagttttaaactctttataaaaataaagtctgtaattattctcatttctatgtattttttgtacatgcattttttttctatttgttgtccatagattgttctcattcactatagaataaatttatagtcttatatttttttttttttctgttcataaaaaaataaaaaaaaaaacaatccatattctttagaaaatataccggaaaataaaaaactgtaaatcgaagaaagttgtggacaatttgaaaatgtcgttgtacatatcttttaagatatacaaaaagaatatatgtatgtacatagaccagcatgagaacccagctaaaagcacatattctatatatatacatatatatacatatatttctgcatcgttgaaaatacaattctaaaatttttaaaaatttttgatagatagacaggtaaaaagttagagaagaataagtgagaaaaaaagaaaaacaaaaaaaggaatagtcatactagtatactatataacaaaatatacaatcaaatggactctgtgataccttatccatgttttataggaccaagcaaaattcgaactttaatagtaccaattggtaattggaaaaggaaggattttttacaagttttagataaatttaaagagtttgatgaaatcagattattagatattactcccattgattcaactttatttaatccacaggggtttcctaacggaaggttgttttataattttaatactttgagttataacaggaataatgaattggatttatttctctatgattttgaaccatttaggaagactttcattattattgggttggttaacgatcatagtgatccacttgaaaatatcaacattttaaaagataaatatcctacaataatatcgcataatttaatctattgtacggcttcaaaggataaaacttttgatgatattaatactttaaataactgcttcgttactaatatttggcaatttgataatttagagacaattttatgtgatataggtagagattttttgatcgcattgaatcgttattattcttcgtataagcatgttactttaagatctcctggaacagtcggtggtaattcaattaaaaagactgtaataaataaatatctagaaagacctgtcttaaattctcagttaataaattcttcaaattctattatagaaaattcaaccacatctaaacgattatccacttttgaaattacaacaaataatttaaaacgttctgcatctattaaattgacatcaaccttgacatcatctgaatccaaagcgcaacaaagatcaaagggtaggcaattgaaaatcttaggtaattttcaactattagcaggtagatatttggatgcattgaatagctttactgaatccataacattattatacaaagttagagatttgttatggttgggttcagcattggatgggatttcaatgacttttgttcttttgtcttaccttaatatttcttttgttatcccagaaataattgatatcgtatgttcattaaacattcagataaacaatagttataatgatattgataacgatagaaatagtaacaataattctaattcatatattaatactaaaaataaaggaactccttccaaggtttcaacaccaagaaatagtgtttcggtgacatcattgcaactgcaaacagcgtcacctcgcaattcacttgtatttaataactctaataattatactggttattcaaataattgtttgactggtaatatcccagtagaagacattaatttgcctaagttaattaaattaataagtgataaagtattgtattattacgagttgagtctttctcacaacaatgaatatgttccacaaatagtctattgtgatacatttttgaaaattttgatgtttattgtaaaagctcaaagatctattgatcaattttcgccatcagtgattaaaagtataatcagcagtacatttaatccagatatgtttagaacaagaacctatagtttagagaattgggatcctgtccaatttacaccaactgatgtttactattatgtaaatcgtttgttcgaattagagatttgtactatgactcttgacttacaatctgcagtatattggacagcagcagcaacttatagaacactaggtttgaataaaaaagaagcgttcgttttaaagttattcgttacatcattatttaagtcatcacaacatgtgatgtggcatcaggaattcgagctcttattagatagaattgtggatttatatgggtgtaataaagttgaggacaacagttttgacagaataagtaaaaataataatgtttgtttgactttgcaaaaaaatattttagaattagtaattaatgtgagcaaaagattagataatttaaaatatgttgtaaaatattcaattatacttcttactcaatatgaaaatgttttaatggctgaagaacaaaggagcattcttcaaaacattaaaagtagtatagagaagaatcttgttacagaatactgggatagaaacattttgcaggacataacaataatcagacaagatgctgataataatcaagaatcattattgccattaattagagagattcaagatgataaaatttctgtagagaatgatgttgaatcaacagtgaatacagaagaaatttttaatccatttaaagaggaacggcatatatcgaagaataatgatgaactttctttcgatacatacctggttaatgataaagtagaggtatgttttgctattcgaaatcgttataaatttccattattaataacaaacatagatttactagacaatataaaagaattttgcatgttaggtgagagtaatatcaccatggataactcatttgttgttgatcctgaatcaactgcttttattaatattcccttaatttttaaaaaggaaaccaatggtaagatactacatataagatctgcattgctttctatatttaaaatgcccagtaaagaatatgaaattaatgcaaaatatgatacagataaatcagtttctttggaacattcctttaaatttaaaatattacctgaacagccatgcttaggcattattaacacatctagaatgacagataattgtattatgatgttggatggtacgaagggtgacttttacttaaagctaataaacaaatcattaaattgtccaataaattatttgaaatgttacatagttacgaatgtacaaaagaatttaagtccagattattggcagaaacaacgaccggatgagttatatttttttgaaaaacagttagaacaattgaaaaaaaagtgtataactatacataatttgccctcaaaaatggaacccaatgagatgtgtgatttgcatttagaagtagatctaggtaatgctccttctgatttttcgaactttgatttaattatggaatatgggatgaaaactaacgatggtttacacctgtttgtaaaagagttaagtagtcattttgaaataactataaaaaaatctctggaagtttcaaatattgatattattttattgagtcaggatattagtgataaaaaagtggatacagattggatacagtatcttcaaaaaaagcttcacgagaacacaggtgacaatatgttgaatatttacgattattctttattactggtagacattcgtaattcctggattgatggtatatctttacaaacattttttgatgatttcaaaagtaaaaaatatactgtagaagctcaacatacattgagaatgattattcctgttcgaaggattgaagcacaaggagaactattatctgaaaagccaatacctatcatattcaaggatagacaatttattcaaagtggtctgtcaaaagctgaagagaacacaatgagaacaaagttttggtgtcaagattatattttacaaaggctgaaatgtgaatggagcttatgtcatgatgatacagttaatggaatattaaacataaaaaattacatttttaactcaaatggtgatattgttcctgtcttatacaagggtgataatttgtttttaattcaaatgagcacaggtaaaacctgtgtagaaaaaggaaaccttgtttcagtttatgtatctctaagtcccattaagataaaagatttgatggatatgccagatattgtatcggtaaatttgttgatttttgacaataagacagcaaggccgttgttaaatcctaataggcgtgtactgtataatgggtctttgagtaaatttgtggcaagtcgtagtgagacattatcaacttttgaacttttaccaattgagcccggaacatatcgtttatctgtgtgtattacatctggtgcagaccgcaatactattctgcaagatgatatatccattgttgttatcaacgtcacctaattgtatggcaacatctactaatttatgtaggtatatagctgaattgagctgatataatttattattttgcattacgttagatactattcgatatatcttgtgcttagtggtgagtgatgttcttttgtcattgagtgcctgtgtaatattaataaggttgcgtaagagttgtggtaacaaaatagataaattatatcaactagtttagatgtaaaaactcttatagaagctctgaatataataatttgagaaccttgatttgtggatatttacctgttattgatatgggttatttaaagaggggttaatttagttatttttttaatattacatttaaaaacacaaagagagtgtagattatgtattaatctaagtaaatcagcattaatattatttctaaaattgactactattataggcttatcttcaaagggttatctcatcataatattaaattctgaaaatcatcgttttaatgacagatgtaaatttaaagtttctgaaataatatacagcattctagttatatgacccagagtatatggatggtagttgggataaaaaattattgtacaaaaatatatatgtgtatattgtttattttctgctcccttgtatattagattatctagtctttcttgcaaatttagatagtacaactaagttcttctaggaggttataacatattgcaaaaaatataacagaatgaagtgcagaaatgtattaaatacatatttcgtattattggatattatataaatatccctaatttactagaactaaaataatatatgcttatatactaaatatctattcctatttgatccttgttttttcttcgtttgttgctccttttttcttggttgttcccttgttcttatgttgattgcttttgcttttatgtatgtttgtaaaattttgtaaaaaagtttagaaaaatataaatatcacaaaccctcatttttctaagaaaaaccctaagcaatattatcagggatattacagaagcaaaaatgaagggtgcgaggttcgaactcgcgcggacaccgtccaacagatcttaagtctgccgccttagaccactcggccaaccctccaagttccactactgtttgttgtagtatggtgtggtgaagttctttgtgtattccagggaagcgcaaataatattaatagtaattcaaataatcgagacagtaatcaactatagtcgatagtataattactaaaacggtcttatatattaagcggcttatatcgagctaatgtacttattcgaagttacttgacttgttacttgcttgttctattttgtttatacataatatataaattatttacaagaaacgattatggaagatgatcttttatctcctgaaaacgttgtccttttatatgttttctggagctcgatcgattattcagattactacattaatgacttgactgattcaaaccctaaaatttattatattaatttaggtgcactactggattagaactgcatcccaattctctaatcatggtgattagtaatacacgtgggacttaataaaacaataggtaaattctagatttgccaagatcttatgtaatccaatctttttattatgcagcatctaatgttgtagcacatgtatggcttattaatacactaattggttctagattcattcaggatcttatgtaatcttgatggttataactattctattccacaacatcttcctctctctcttgggaaccttgtttccataattgtacgaaattgtcaattaaagattgaccaatatttgttgggagtaagttaaattcttctactggatattctactgtaatagtcggatcaacatcttccatatgacaataaaacactttgttatctttatcgtaaccgactacattaataatttcatgtactcttaatttcctttcggcagcagtattaggcggatcttttggatagcggtcttttctacgttttaacggttttagtttttcaacattaataactctgtgagtctttttcatcgaaggtaaatctaattcgtaagcattgtcatttattttcttaactaccttaaatgggccaacgtatatgggttgtagctttagatattgacctctcttaaaataagcatcacgatgtagcagtacaaaatcaccaatttcaaaggtaacttccttcctccctttgttatgtgtaacttccatgttgatctgattctcagttaagaaatcttttgtgcgtaaagtaagtgctttcaactttgtggctagttcttgtgttgaatcatgacgggaagaaacagcatctcctgtaactatgattggttcattagggatgtatccaatatctacttcaaaaggagctgtcttggttacgcgattgggagtagagttatagacgaattcgatgtgaggaagtaaacgatcccattgtctatgattgttaccagtataagtctttaataacctattaaggatctgtattgtacgttcagtttgaccatctgtttgtgggtgatttgctgtggacattttcaattttatattcaacctttttgccatttcttggtattctgtagaggtaaaacgagggtctctatctgaagtaatggaatatggaaatccatggtaagcgaaaatataacggaataaagcattaataacggaagtagtatcaaatgggtaactaccagcaattaagtgagttctttttgaaaacatgtcgactacaaccataatcatgtcgttaccttgttctgatttaggtaaaccagatacaaaatctatgctaatatttaaccatcgaccttcgggaacttcagaaggcatcaataagccctgtctattagggcgatgagatttaatcaactggcattgtatacaggaagagacatattcattaacagagtggtgtaattttggccaataataacgacttgcaattttattgtatgtaacggttgaaccgaaatgaccaccataaaggccatggtcgtgatatattcgaaggacttcatttcgtttagcgtcgggaacaacatagcgttctttaaagtaaataatattgtcattaattgtaaaacaatggcgaaaggttcttgataagttcaatttcttcatatatttcttgaacaatgatgagttgcaaatgggtaagtcttttgtatcaagtttggtaatataaacaaaacaggcagcacataatgggtcagctaggtattcttcgtaccaatttttcggatctaatgtgacggcagcatcttcaatagcagcaatattgtaatctgctctggaaatagcatcagctactacattctttggacctgctaagtattctagtttaaaatcatattcggctaattcatttaaccatttaattactctacgagagggttctttgttcttttgtgccgttagtaaactaatatggtctgttctcaatataaaatgcatgccatgaagcatatatttaaaatgtgataaggcttcgacaatggctaggagttcaagatctccagcagagtaatttttttgagcgccttgtaaagtttttgaaaaataacccacgaccccgagaatttttccttgctcattcacttcttcgagtacagcacctaatccattctttgaagcgtcggttgttaatctgtaatgaccatcgtgtttaaaggagactaatattgggtttgagattaggtgtgactttaatgtgttaaagctctcatcttgatccgtcgaccacttacttttaccatgtatgtaatcctgaatcggttgttggatgtgagagcagcggggtataaagcgtctataatagtttatcatacccaaaaatctttgagcttctttaattgttctgggagtgggaaattgttctatagctgcacatttcgagatcaacggttggattttattagcagagatagtgtatcccaaaaattcaacagatttagcggcaaagttacattttttcttttttacaattaatccttcttgagttaacctttgcaatacgatgtctatatgtttccaatgttcatcaacggaacgggagtgaattaaaatatcgtcgaggtaaacacagacatatggtaagtccctaaataaatcagccatataacgagcaaacgtgcttggagcattaacgagaccaaacggcatgacggtatattcatactttccattaggagtaacgaaagcggttttgaaacgatcgtccattttcataggtatttggtgataccctgagtggaggtccaaagttgaaaaaatggttgaagagccaatcttggccaataggttgtcgattctaggtaatggaaacgggtctttgattgtcacagtatttagagctctgtagtccacacataaacgatatgtaccatctttctttttaactagaatcactggtgaactacagggtgacttggagggtacaatgaatttcttttcgagaaggtcggcaacgatcaggtttatctcttgttctatttttggtgtcgtctgatatggctgtcttctaggcaggcgtgcacccggcttaatttcgatctcgtgttcaacctttggaggttcagcgaatttcttaggtggtaaatcatcgcggaccgtagcagaatatttctcttttaaccagcgaggtagtttatcaaatcgatcatctgtatctgtttcagaaatctttatagcaaacacagcagcagcattttcaacatctaattcttcggtatcattctcggtaagtacggatacaatgtattcagggaccggtttcttgttatttaatatcttgtggagcagcgggtgagatgatataatcgggtgtcctattatgatttcaaaagtaatagcatcagttatgtatacgggtgttttaatttttatgtcatcgagttcaagtaaaatttcggtggattcgttagtgtatgacgattcggatgatacaacacctctaaaacggaatggcggagcggtagaacgtgttaacttgaggttgtcagcaatatcggctctaataaatgatgtgggggaaccagtatccactaaaacattgacaggtttttctttaataaacattttaatttggcaactgttgcctacgagtggatggggagcggacacgatgggagctagtgtgacggtgttgttgtggaattgtttttcatttgggactgctcgccttacggttagggcagtcactgtagcggtgtaatggcttgtaacaatagaaacataaaccatgatcaatacaatattgacgagagggacgcttaattggttgtttgtttgcttggaaaggtttgtgagttccctttctgccccctcttccgtgtgaacgataaacagcagcaacttgaggatgatgatcagtagtagagtccatagggactgggttaagagcagcggccatatggatgtctccatccatatcataggtggtgaaggtaggaaatgaacggttggtgatggaaactgtttcactggcagcttccatagcagcatcaacagtggtagggcgagctagagctaccatacgggcagtatcaggagtaagaccgcgataataaaaaagtaattctcccttgggagtccaaatgtttggaggcatcaaagctaatagttgtgaaaacttttgattataagcgtcaatgccaacggtaacttccttcaagcgttggaacgcattgaggatggcatgagggtcgatcataccaataaacttatttttaaaatccacaaggaattgttcataggaatgttggtcatgattacggatccattggacataccattgagcagcgggtccagttaagtttcggccaaaaaaagctatacgatccacatctgtttggaggtttcgagcataaagttgtgcttcgacagtaacaaggaaatctggtagtttaaataaatcatagcgaccagagaagcgcattggagcagtactgtagtatttggaatcggatgggactggagcaggagcagaagtagggtcagcggttaggttagtagttggagcaggagtagtggttggtgcggtggtatgatgttctgtagccgtagatgcatcaatagcgtctaaaaattcgttcatatttaaattattcgaggacatgatgaaataaacgctaccagttgttgtagtatggtgtggtgaagttctttgtgtattccagggaagcgcaaataatattaatagtaattcaaataatcgagacagtaatcaactatagtcgatagtataattactaaaacggtcttatatattaagcggcttatatcgagctaatgtacttattcgaagttacttgacttgttacttgcttgttctattttgtttatacataatatataaattatttacaagaaacgattatggaagatgatcttttatctcctgaaaacgttgtccttttatatgttttctggagctcgatcgattattcagattactacattaatgacttgactgattcaaaccctaaaatttattatattaatttaggtgcactactggattagaactgcatcccaattctctaatcatggtgattagtaatacacgtgggacttaataaaacaataggtaaattctagatttgccaagatcttatgtaatccaatctttttattatgcagcatctaatgttgtagcacatgtatggcttattaatacactaattggttctagattcattcaggatcttatgtaatcttgatggttataactattctattccacaacactgtttttgctgtagaatagaataataacaattaccataattaaagaattagggtgcagttctaatccactagtgcacctagattaatgtaataaaatttagggtttggatcactaagcacgttaatatacaaatctgaataattgatcgagctccagaaaacatataaaaggacaacgttttctggagataaaagatcatcttccataacagttttttcgtaaataatctatatgttgtatacaaacataaataaaaaaagcaataatccttaattctcctatatataacgtttttatatatttgttattgcccttactattcgttcaatagtcctgttaaagaattagtcctaagtccaaactataacagctttttgtagaatagagacgttattaatatcaagattatataagatcctgaatgaatctagaactatttattattttaataagccatacacatgctacaatattagatgctgcataataaaaagattagattacataagattttggcaaatctagaatttacctattgttttaatgagtcccacgtgtattactaattaccatgattagagaattgggatgcagtttctaatccactagcgtacctaaattaatgtgatgaattttagggcttgaatcagtcaggtcattaatgtataaatttggataattgatcgtgctccagaaaacatataaaaggacaacgttttctgaagattaaagatcatcttccataaccttttcttgtaaataatttatatatattattgctggaatttggagcccccaacgtccatagtaatggcagacattattaagttatagatgctttttttattgtgtactaaatacatgtataaacttattatatagcgtatatagtataaattcttgtatttacttcagggcttcttttaagtttttcatttcttttgaaatctgtgaaaaacatatttggtgaaaaataaaatgtcttcctgatatcatggtatatccgaacatcacataatatatagaaaaactaattaaaaataactcctatggaaatgacagtaataaactctcattttccaacattttttattagttaaagactttcttatgacaacaagtgttatttgtggtgttcagatatatagaagaaaagaaaattttgaaaagagagaaaggaacaagatataaaagtgctgaattcgaatgttctagaataaataaatagaccaattagattttagtgaatattaattcttggaaagtagtggtatttgtgtttaatacagtcatgacttaacttattagtaggttagatctctggtttcttaaaaatctataaaaataatgtacataattatatgatatgttatatatatataaatataaattgatctctcttcttttgaatctctccttaaaatttttcttcttgaaaaatattttttttctcttttaattatcattattaacgaaataataaaacattctttaataaagaaacctaatagacatactgtccatgttctaacattaattgataagcaaaaagtggagaatgtagtgtttgtttatcagtaggtgtaagcaaaccttatcaacaatttgataccatgcgtatataagataggccagatatgaaaatatataaagccaacattttttcctatcatgtttcttcccttgctcattttttatagatcatccttgtataatacatacaaataaaagaaccagagaactttattataatttatatactatatctatctaatataatattgagaatgtttactatatacccaatgactacaggcgctcattctcaacaaaaagagtgttttatttgctcttacacaacacatatgtatatgtttaaatagtatgtataaacagaaaagactaacaactgatatatataaactaaaaaatatctaatatgtttatcggttgaggccacaggcatccaggaaaaattcataccagaatgcaagatatctattgtttgcatatcagtaaatgtaaataaaacatagtgataaatttgtgtcgtttgtacgcgagttttgtcaattatgaaaatatacaaagccaacaattctttgatagcatgtttcttcatgtatagattttccatatgtcatcatttttatattgtatatgccagagaagatcgaaaaataataatatcatttttgtaccatatagatatattataataataattgagaatttatactacatattaaatgaatacatgcgctaattctcaagtccatagctgctttcgatttaaaacttatgttttttaccattattttttgtaattttataaaaacttttattttcaccagtttaatatgtaatatatttgataacttctttttattcctaacttcatgtaatcacaagtatttatcttaaatttaagcatttaactttaaagttattgtttcatatgcgctggttgttatattgttatttttgtcgtttatataggtgtcggttaaagattttattctatcttttacttattgaataatgcttataaagaattgtctaatttttttgatacttctttatttatttttctagttctccaatactgatattttccttaactatttcctttaaccttaatttgatctaatatttgttgagaatgaggacctgtagtcattggatatatagtaaacattctcaatattatattaaatagatttagtatacaaaatcatgataaagttcttcactttctttctctatatacaacatagaaataataatatacaaaagttgtaaataagataaaaataatgtatgatgaaatccttgactttatatgttgaaatatgattaggattacgtttgataatctaaattcgtcgtactaagtgattaaaagttatgaaaatttatattaaagaagattcgaagataaaacgagtatactgtataatatcgtatcttgtatattacttatatagaaagaaaaagaataagcaatacaaaaaaaacttataataccaccaatatcctattgtaagttacattatcttattatattagtttaaaatgaactctactagaatttttgattccgaagccttgcgtcaacattatatatgttaatactaaggcattttcttctacgaacagtaagatatttaataaacaaactcaataacatttggtgacctctcaacaattattactcaacaatttatcgtttagtgtctgttaaaatcttattgttctatatatttcattatagaacattctatttcaacaatatttttattttatggtgtaaatatagtatgaagagtttttaattgaagatttaatacatagtgtgttttagtttattttttaatcttttttaatctaaatttttaaaatttttcacccatctcagaatgaagttagattattagagacaccttgtaagagttgttgtatgtaaatggatgaatcggatcaattaatataagtataaacactcttacgtaagctccatatatcattaattaataaccctgatgttgtattatttcttctttttatccttgttgtatgatattaagagttgcctcttcatatcactactaagatgtatttaaataagatgattacccctagtatatatctcaataatcaaaggcctcttgacaagacctgatataattatcactctctggaaatcctccaatcaaattcaatatcttatacgagccactgtgtacatggctgtatcattcttccacccagacactcaggtattaccctcagaattgcgaatctttggatttccagttaggttccttacacacctctaaccatatttcaataaattacataaattattttaaacagaatttttttaagataagaactaaatttataggacttatattagaaaaattaaaagaagaaatacaagacaggtgaagtaatatatttaaaagagaaaagaaaataatttggtgtattccttaattaaaaagactgtgtaggttaattttttaatattaattagtatgttaaaaaatcatataaagccagagaatacattttcaacgactgactaagaaaactagtatgatttttagcaagtgaatttcacccatgaaagaaaaaacccactcctttatggaaggggtagaaaatggataacatgtctaccaagtttgtttattaatgaatattttttattgaactgtaaggaatgatggtaccagagaaaaaatttttaaggaagaaaaaaaagttatgaaggattaatttgtacttatttacaaatataatatattattgtgtatgttatttatacaatttcttaataaatgagagattcaactgactaataacttatgtcctaacaaagctagatacaagtatcactactttaaaaaattttaatcttcttctttactggacctcgaattagctttaaatagtaaaaaatatggaaaagaaatcccagcagaccgcttttacatattaagagtcattttaaaacagtttttccagttagttgaaaaggtaaactactgcaaaaactatccacattagcatttatttctataaggtatgtgattaaaaaggagagaagtatattttattttcgattaaggttacaatatttactatgttaataagttacagttcatttgttgtttcactattgagttactttcttttatatgctgttggatacttggattgcaactatagtatagatttaacaaggtatcatggcttcttagaaacattacactatcattgatcttaactatgttgatataacggatattcacatacgcttaaggatctgactattgtagtgctgtaagatagcttctatatcttccttattatatattttaatttcaattcagattttttattccatgaatatactttgagtgtttgaaggaatagatggaagaaaccttttttttgcatcttttaaaatcttgtaagttccatattcagcaaaagatgcggaaggatataacagattaatagaacaataagatataagtattgttattcgagaagatatctatattttttaggtataacgcctctaatatatttagtaaatataacaaatcattcatgtgcgattctacgtaattaaaaaatagctaactctttctcttactttcactttgtgtccctttttttttgatatataaaaagagtctcttttgctttacatattaatataaatacatgtatataaatatatagttgtttggtataagagactatagtgttttctaataagcgtagtacattttatattcatagatatacatattattttatttataacaatgtgtacgtatacataagggaaataagcacacaattagtgaatttggaaaaaaatggtttttggcactttgttttcgcttttaatgatcatatttctagttaattttttggataaaattgcatgtagaggaagcttttaacaattttgtattattcatcaaaacttttattattatctttgaaataaattaatgttaaattttttttaatcacaatttttttttaattaaaaggggtttgagattctattatcttttaaaatatgatcagttgacttcaaaagtataagacagtaaattttctaaccccaatctctttattaaatattgtcaaaatatgtaatatgaatatgtgcttattaaaatgcttatagaggaactattagattgtattattatgtcgaatcatctagatccttcagctacaagagacagtattgttgattcggcatgcataatcatatatatcttcaacatataagttgtttgaaaaacaatcagataaataacaaaactacacagcatgcacaatatttgaatattatatatgtttatataaaattatttaagtatttaattaattaaacttctttatttccaaattttctatgtgcatacaatttaaacaatcataaataataataggctgacaaaatgagcaacattccagttcatatatatagtgctacccttaccctcatatgatacaacagaaggtgcaccttcacgaggtgctgcaataacggttggtgatgaggataattgttcagaaacatattgggaaacttgtggcatcactgtaggtactgatgtttctggtcttctagattcaacattacctactgcagtgctagatcctctagagtttccagatattggtggattttcattattggtgtacatttgagaaatagtaggggaagcaatagaagcgactggagttgcattggaaacagcagaagatgagctaatcccttcttgttggttctttgaataaactgattcaatagagccatgtccaatgatagcagtcacacttgttccagaagttgcggatggctctggacaataagttgtagtcatagtaactccattaacaaccgtagtcaaaacaactagagtgccactcaaagtagattcaatcttttcactaggaatagttgagtttctgtagagaggagatggtacagaaattgatgatgtcataaagctactaaatgaagatggtgtgattataacaacaacaacttcagtagaggaagagccattgctgtcagtgactacagttgtgtaggtagatgtggttggaacactgactgcactagtagtagtagtggataaggtagatggagctggtgtgatcacaacaacaacaacttcggtggaagatgagcctttgttgtcggtaacaatagtggtgtaggtagatgtggttggggcagtgactgcaccagtagtagtggttgaaatgacagaaccagatgggtgtggtgtaatcactactacaacaacctcagtagaggaagagccattgctgtcagtaacagtggtggtgaaggtagatgtggtcaaggcagagacatcaccagtagtggtcgtatagaaggtagatggagctggagtgatcacaacaacaacaacctcagtagaagatgaaccgttgctgtcagtggctacagttgtgtaggtagatgtggttggggcactgactgcaccagtaatagtggttgaaatgacagaaccagatgggtgtggtgtaatcactactataacaacctcagtagaggaagagccattgctgtcagtaacagtggtggtgtaagtggttgtagttggggcagaaatatcagcattagtagtggtgtagatagttggaccacttggagatggagtaatcactactacaacaacctctggggatgaagaaccgttgctgtcagtgacagtagtggtgtaagtagatgttgttgggacagaaactggacctgtagtagtggtgtaggaagtagatggagatggagtgatcacaacaacaacaacttctgcagaggaagacccattgctatcagtgacggtagtagtgtaagtagctgtcgtcggagcagaaacatctgcagtagtagtggtgtagatagttgaaccagttgaagatggagtaatcactactacaacaacctctggggatgaagaaccgttgctgtcaatgacagtagtggtgtaagtggttgtagttggggcagaaacatctgcagtagtagtggtgtagatagttgaaccagttgaagatggagtaatcactactacaacaacctctggggatgaagaaccgttgctgtcagtgacagtagtggtgtaagtagatgttgttgggacagaaactggacctgtagtagtggtgtaggaagtagatggagatggagtgatcacaacaacaacaacttctgcagaggaagacccattgctatcagtgacggtagtagtgtaagtagctgtcgtcggagcagaaacatctgcagtagtagtggtgtagatagttgaaccagttgaagatggagtaatcactactacaacaacctctggggatgaagaaccgttgctgtcaatgacagtagtggtgtaagtggttgtagttggggcagaaacatctgcagtagtagtggtgtagatagttgaaccagttgaagatggagtaatcactactacaacaacctctggggatgaagaaccgttgctgtcagtgacagtagtggtgtaagtagatgttgttgggacagaaactggacctgtagtagtggtgtaggaagtagatggagatggagtgatcacaacaacaacaacttctgcagaggaagagccattactgtcagtaacagtggttgcgtaagtagttatagttggggcagaaacatctgcagtagtagtggtgtagatagttgaaccagttgaagatggagtaatcactactacaacaacctctggggatgaagaaccgttgctgtcagtgacagtagtggtgtaagtagatgttgttgggacagaaactggacctgtagtagtggtgtaggaagtagatggagatggagtgatcacaacaacaacaacttctggagatgaagagccattgttgtctgtgactgtagtagtgtaagtggttgtagttggggcagaaacatctgcagtagtagtggtgtagatagttgaaccagttgaagatggagtaatcactactacaacaacctctggggatgaagaaccgttgctgtcagtgacagtagtggtgtaagtagatgttgttgggacagaaactggacctgtagtagtggtgtaggaagtagatggagatggagtgatcacaacaacaacaacttctgcagaggaagacccattgctatcagtgacggtagtagtgtaagtagctgtcgtcggagcagaaacatctgcagtagtagtggtgtagatagttgaaccagttgaagatggagtaatcactactacaacaacctctggggatgaagaaccgttgctgtcaatgacagtagtggtgtaagtagatgttgttgggacagaaactggacctgtagtagtggtgtaggaagtagatggagatggagtgatcacaacaacaacaacttctggagatgaagagccattgttgtctgtgactgtagtagtgtaagtggttgtagttggggcagaaacatctgcagtagtagtggtgtagatagttgaaccagttgaagatggagtaatcactactacaacaacctctggggatgaagaaccgttgctgtcagtgacagtagtggtgtaagtagatgttgttgggacagaaactggacctgtagtagtggtgtaggaagtagatggagatggagtgatcacaacaacaacaacttctgcagaggaagacccattgctatcagtgacggtagtagtgtaagtagctgtcgtcggagcagaaacatctgcagtagtagtggtgtagatagttgaaccagttgaagatggagtaatcactactacaacaacctctggggatgaagaaccgttgctgtcaatgacagtagtggtgtaagtagatgttgttgggacagaaactggacctgtagtagtggtgtaggaagtagatggagatggagtgatcacaacaacaacaacttctggagatgaagagccattgttgtctgtgactgtagtagtgtaagtagatgttgttgggacagaaactggacctgtagtagtggtgtaggaagtagatggagatggagtgatcacaacaacaacaacttctgcagaggaagacccattgctatcagtgacggtagtagtgtaagtagctgtcgtcggagcagaaacatctgcagtagtagtggtgtagatagttgaaccagttgaagatggagtaatcactactacaacaacctctggggatgaagaaccgttgctgtcaatgacagtagtggtgtaagtggttgtagttggggcagaaacatctgcagtagtagtggtgtagatagttgaaccagttgaagatggagtaatcactactacaacaacctctggggatgaagaaccgttgctgtcagtgacagtagtggtgtaagtagatgttgttgggacagaaactggacctgtagtagtggtgtaggaagtagatggagatggagtgatcacaacaacaacaacttctggagatgaagagccattgttgtctgtgactgtagtagtgtaagtggttgtagttggggcagaaacatctgcagtagtagtggtgtagatagttgaaccagttgaagatggagtaatcactactacaacaacctctggggatgaagaaccgttgctgtcagtgacagtagtggtgtaagtagatgttgttgggacagaaactggacctgtagtagtggtgtaggaagtagatggagatggagtgatcacaacaacaacaacttctgcagaggaagagccattactgtcagtaacagtggttgcgtaagtagttatagttggggcagaaacatctgcagtagtagtggtgtagatagttgaaccagttgaagatggagtaatcactactacaacaacctctggggatgaagaaccgttgctgtcagtgacagtagtggtgtaagtagatgttgttgggacagaaactggacctgtagtagtggtgtaggaagtagatggagatggagtgatcacaacaacaacaacttctggagatgaagagccattgttgtctgtgactgtagtagtgtaagtggttgtagttggggcagaaacatctgcagtagtagtggtgtagatagttgaaccagttgaagatggagtaatcactactacaacaacctctggggatgaagaaccgttgctgtcagtgacagtagtggtgtaagtagatgttgttgggacagaaactggacctgtagtagtggtgtaggaagtagatggagatggagtgatcacaacaacaacaacttctgcagaggaagagccattactgtcagtaacagtggttgcgtaagtagttatagttggggcagaaacatctgcagtagtagtggtgtagatagttgaaccagttgaagatggagtaatcactactacaacaacctctggggatgaagaaccgttgctgtcagtgacagtagtggtgtaagtagatgttgttgggacagaaactggacctgtagtagtggtgtaggaagtagatggagatggagtgatcacaacaacaacaacttctggagatgaagagccattgttgtctgtgactgtagtagtgtaagtggttgtagttggggcagaaacatctgcagtagtagtaatgtaagtagtagatggagatggagtaactacaacaacaacaacttctggagaagaagatccattagaatctatgactgtagttgtatatgtagttgttgtaagagaggcaacgttacgcatagttgtcatggtagttgatgaaaaaggtgttttaattaggacaataacctcaccaaaaatggaaccaccagagttagtaacaacagttgtataggtagttgttgttaaagtattgatactatgagcaacagtacttgacaaagtaacatatgacattggagattcgatcataacaattttactgacggtcatgtacccatctgtccctgtaaaagtggtaagagatgtagttgttgtaagcttagtgatagtagttgttactgtagtagtagagcttactgttgtcactggagatggggtagccacaaggatgatttctttaataactggatgatcatcgtctaggtaactagtagtcacagtcgtagcataagtagttctagattttaaactttttagtgtgcttacactactaatagatgtaaacgttgtaaaacttgtagaagtagtaaaagaataagtaatagagattggttcacagttatctgaagagttatcaaaacctgaatacacagaagtgccgatatttgtgtcttttgttccgtctggaagaataacagttaattgattttttgcaattaaaagggcattgataaaatatattttaatagggtaagacctacctgcttctaggtaaagttctcttattgtcggagactgagcatcatattgattaataaatgttgcattggtaccaaaaaaatcgctactatgtgcacaacaatcaaaagcagtaccagcaccaacaaaaatgatacctgcatcgtctacttgataagagaatctgtagagaccagtttgaggagccacataataaccagaaagtgccacagaaaaatttgtcgcagaaaattcagggtaaaaaggaattggtcctccaaattgcgaaaagaatggattagtaacacctgttactgttggtcctggttttaaaatacttaggtatcctccgcttaaaaactctgtagaatgagaatacctgagattaccatatggataataataaaactgggcagtgaagccttgcgtccggttatttatggcaggacatgctgatggactataaccagccaatacaatttttattaatgtgatcaaaaatattaataacttaaatattgatccattcataatcttatatttttaagcataagtgatggggggaggtatttattttctttaatgaaaatgagattggatttaatatcgataacgtctagtctattagcaaaacagagtgtaaagttgaaaaagcacgaagaaagccagtttatagagacattacagtagaaaaaatttttttgtgtttttgttagctcactcttatatatacagagattgtattttgatatacgaaaaaattattaaaatacgcagttctatagatgaataatagcaatatacaagtcttttgtttttctaaagatattaaatcggaaatgatatttagaaatgccttaaagagcgaattaaaaatttttagcctacatttattttcagtttttcatttttaataatgccctgcattgtataacaatagatagagattatttttgactttgtattttatcggaacaattttgaatatgttgagagatgttagatacttaattggaatatgcgcatactttaagaagaacttagttattctgtgaatatttgtatatttatttatggttatattgttagagaaaaactgtattgtaatctttttgtaattccctaggtggaatttgtggtcttataacataaagtatacgaattcaggaatgttcatcacaaaggaacactacttacgtaacaagcaaatttcatttttccaagattacaaaaccctaacaaaaaattgaggattatcggttcaatttcgaagaattatctatgacgtcatattgatacagagattccttctcatttctcaggtttttgctatacaaaaacaattagaattctagatgaaataataaaataaaaaagcaataaaagggtgtcgtatttttatcaaacaatacaaatgaactacattttgcatactgaattaaaaatttttacctttgcaattcgcgaaatatcagtagcaaccagatttggtcacttcatattaaggaaattgtaaggccagattgaaaatttatctattgttttttttttttttaaaaagttattcataaaaattctacagaaacctcacgtgtttataaaaataatacctgatttactcgattgatttttctaaatactggatgaacaataaaacgaagatcgtttaataaaaagcttctacttcatgtctattaaaaactactggggtcagtggtgttgtcctttataccctttctatatattggaaatatcggactggtatacataagtaatttctacagtggatgaaccctagtaaatagataggtcaaatagaaaggatgtttagtattctttgaacaaacaaagcttagctaagaataaaaggaaacaagtctttgtaaatcgattaatggtggatgtaagtggaaaaaaagtaagactaaaatagttaacaaatgaagttgttttatttagaaaatatctatacatgaataaatagtcatatcctttgttatgatagttttataaggaactgtttataaacaaagaaaaattaagtttcaataaatgtgtattttaaatgagattctttttattacaaaatggcaaagtttttaataaaaggtttggttactgacctatatcctagatgagtcggaatgacatggataattcaatattttctttgttttttttatggaattgaattgaactttttattttaactgtatttttatttatcttcactataggtgcaagtgattttccattggattgtaaaaaaaaataaaaagaaaagaagaaattagttcaggatgagcaatacttttgtctgttcttccaaataaatattaatgacattcacaatctgaaactggttttgaacttctccataaaagatatttgaataaaaaacaattttacttgatgatgaaacatataagttattggagtcatttattattaatctcttcttatacattggaaatattttaatacagtagattttgatcctgtaaagactctaaattttgtaatgaaaaaaaatgagaatctctaaggatttctgtgtgaccttatatatataattactttaaaaaaacactatctcagaagtttacttaataaaaaggtgattggagaatagtaaaaaaaaaacagtgattaattacaagtaacccatattatggttaagatatgcaagttgcaaattaattataaatgatttttattttttgccctgtcaaataaccattactggaaaagatatttaaaatattaaacaaaaacatctcattattttatctaaaagaaaaaaatgcctatagtattcttatgtcttcaactgcattagttcaataaaaaagaaaatatggtttattatttattattgtgatgttctaaaatgacacataaaaaagttgtatattaatgaatatgaatagaaaatacaaagaataaagtcgttaagtataattaaatatcattaaaggttgaatataagaatagatttctcttgttcattataatttttttgacaatttgcctgagtgttttggtactcttgccaaccaatacaagaatataccagcacagtagttaaatacaatatatgcacagaaaataccatagtttctccatcttctgccgtaaatagatccaacagttgctaagaatacgttggtttcagagaatttacagaaatggcaaatatccgtggcatctggatcagataggtaaccggtacccatcatctgaatatacggggccatatactgtccacatgtcataccttggggaggagttaattgaacatattcgtaatctgcacatttgactgggacattagcaacaccgattgataacattgcatcaataagatatgtgacaggtgacacacgatacataaatatccaaaatcttggtaacaaatttttttgtaccataacaccacagaaggataaggacatagtgaatagtaaattagcgatgtgcgcagcagtttctgccacttcattccatgatataactaaaatacccatagaacctatgtaaacgtagaaagcagtggtgaacaaccagaataaagctcctctttcgtgtaattggttagctgcagaagcattattatagaatcccacagcataatagtaaatgcaataagcaattgtacctgcaagaatattccaaggagcttcgacgataatttgagctataataaaagctttccatgaaaatgtccttgaaggacgttctcttgcttcatataaatccctttgctgaacaaaagagggtaaatattgctgtaaaatcggattaaagataaccgtatacatgaagatagataacatttgattttgtaaaccttgcaaggatctattcgctttaaaaaatgtaaaaccaatgaatagttcattaaaaatagtaaggataaattttgaccacaggtaacttggcgttctccaatattgttggaacaaacgaatacaaaccaacttacattggtatggtatagaggttgcaaattgtttcattgtctcattaggggattcttctgtaacttttgggagctctgcctccatccaagttaactcgttttgaactgccttatattcctctgaatttctccaaacttgatgataatcttgagttgcaacggatcctggggcagcaccaataacttctaacatccattctgctggattggcatctggtggacatttatgagcaccatgatcctcaaaatacttgatcatagttttacaaccgtcacctaggtcaccaaaatatacagtttgaccacctttttgcaagaataataaacgatcaaattcttgcattaatatggcagaaggttgatgaatggtacataaaattgcctgaccatgtgtggccaattttctcattaattgacaggtagcccaagcagtttgagaatctaaaccagaagttggttcatctaaaaatactaataaccttggctttgctgctagttccacaccaattgttaatctttttctttgttctacatttaagccttcacctgcttcacctacaatggcatcagcatatggttccatttctaaaatcttaataacttcttcaacgtaagcattcttatcagcaatggaaaccgaggcaggttgccgtaaataagctgaaaatcttagtgattctcgaacagtagcagttttcaaatgtaaatcttgctgttgacagtaaccaattgatcttgcaaatgactcatcacgtaagcgcccattgacaaagattttaccggtaacaacacccattgttactctttcagccaaacaatccaataaggtagttttaccagcacctgaagcacccattaaagcagtaagagtaccaggtttaacccatccatcaacattatttaaaattcttctattttcacctttaatcttaatatcgtagcaaacatttctccaatggaatatggcttttgagtctgatattttgaagttatcaatatcattattaagctcctcacgatgtgatctaatacttttgagtacagtttcgtcttctgcagtagaattaatggtttggacacttttaatccttgctaatgcagtatcttcagagctctcactatgttcaaaagcttctttagtgattggatgtggatgatacgtctcattattagatgtggcagaatcttttaataaagcggcgtcagttaacgcattatcttcattcccagcaaacttttcgatgtctgattcatctttagcctttttatccttgagtttaccttcctttttcatttttcttaccacagaatatggaaaaactaacatttcacctttttgtttagcgccctcattatattcacaaagtatcaagtagacgaaaaagaagaagacaaggtaagccataccaacaccaaaacctctccatttatgtttgtgttcatactgataacttgctttcaaatagttatcaccaagaacataatcttcaccgggaattgaaccaacaacattacaaaccctttcactaccagtactgttcacataaaagggccccattggaatgtaagtagaacatggatatttaatactgtgaaattcattaatcatcaaggattcaaaaagatatgctaacggattgatataccaaatctattttgaccaacctaacatactagtctttggaattgcaaacccagtatacatggccatagccaacagcagcatagatgcaggaaccatagcttcctgaagcgtcttggtgagagaacctacacatctgaaaaggtgagacatagtgaatgtggctacaatgttgattaagaaatagaagaaaaagacaccaccatttctacggaaattgactaagaaatagaaaataatgttaaaacagatggctgttaccaacttagcaggaatctctgagataacagaggcaaatgcttccgcacttgggtggtataatgaataagttctatgtttttcagttattggtcttgcttcataaagagaaaaaatttccaaaagacatgagaatgcattaaatagaatagcaaagaacatagcagcaccacggaaatagaatgttgctgtgtccgtatgtaacataaccttatagaacattgaacctaaaataagagccatgcaagaattaccacaaacttgccataaagtaatacttgaactttgtttgattctccaccagtttctaatcaaaatgtatttaatctgtaacccataactaacgacatatggggatgaaggtttagctcttttcgattgtttagctatatgagcctgtttaacaatctctttttcttcgtcttcatttctacttaatgtttcttcaatttcagccattaacttcttatagttattagattttttccaataatcattcatttcttttgcattttgtgggacacggacacctctttttgtatactctggattaatgattctttcagcaggattggtgatagcagttaaaaaatctgctgtagtttcacgttcagggcatatataacccatatcgagaaaatactgcttggcttctttggcgggcccataatatatttgatacccattatcaagaacacacactttatcgaataaatcataggcatcttgggaacattgataaatagctacggtagcagcagtattagctatttcagcttgtatttttaaagcacgaataaattctaaggcagtagcagaatccaaacctctggtagcattatcccaacactgaaatttggacccacatatagtaacttcagcaatagatacacgctttctttcaccgccagagacacctctcaccaaatcattacctacttttgtatttcttgtatgtgaaagaccatatgttgccatgacgacctcagttacatgtctagcccaatcatctcttgatacacctttaactctattttgtggagtctttaatctagcaacagtatatagagtttggtacacagtaagatgtggtaaatggatatctgattcagcgttgtatacaacttcaccacgataatgttttttaatatcctttggtgataaaccactataccaaatagtggaatctttacttatatcaaacccatgtgtgtttgatgatatggatttcaatagtgtggtacaaccagaacctggtctcccaagaacaactagcaattcaccgggatttaaacaaccttccataggtttcaatatttcgaatttagaagttttttttagaggagaaaattttctatagagacccattaataacttgaagggcaagttttcgaaagttgattgataggtgacatcagcagaatcaccagtagcagatagattcttccatgtacaacccagagaataaggtttataaaaatcagggtctgcagaagccaaattggccatgttttgaacccatgcctttgatgaaaatttatcacttgttgggtctagtcttggatcataaccttcagcgtcaggagaagcaaacactggattgacaccaggtaaatcttgtgagagtattgattgggtatcaatttttgtaatactattactggcagtacttaaattatttaatgaaggggaataattagaatttttcaggttttcgttctcattggatatgttattatttctattgttgttaatagaattaattgagttattgctaatgaaactttgtttagttaaggacctggccaaagatctgatttctttttgtgcagattcgtccataccagtatatggatgttgtaaggagtaattatcctttatcgaaaatgttgtgaattttgaactggatgataaatcattcctatcattattctctatattgttagaatttacagacataatttatttttattaattaattaattaaaatagtatgatttgttacttatttgtattttttttattacatcaatttaataaactaaaagaagataaagtcaataattttatacttaactgggaaaagaaagggtaggtaataaagagtaagtttaagaagataagttaagttgcaaaatacaaaactgtattaaaaaaatagaacataagaactaaaaaagagactagaatgtatatcttacgatagaatatagtttaatctattaactacaagactatatctatctatctatgtatatatatatgtgtgtgttgttttgtctgtatggataattgaatgtattgtattgtattgtatttgactgtattgaatgttttacaataccccaaaagttaaatccgcggaatatgattatattttgcaaattaaatgtgttactgaaaaaaaaaaaaggaaaaaaaaaggaaaggaaaagaaaagagggagaaacagaagaaaaggggaaaacaaacaaacaaacaaacaaacaaacaaacaaacacttaattagtaggggataaatgtagcagttaaaatttggagtagtatagagaaattcgagagttgaaaattagaatagaaaaatatgaagacaaatgttttctttctttttttaaatgaaatcacctcaacactatagctcaacttggtataaacatatatagtattttttttagtttctacttctgctactaagaaggatatactagctacaagatttgattcggtcaatgatatttaccattctctttgctttactcttttattaattttataaatagataatcaagcagacatacagaaaataagattacttatctactaacgatttactataatggcattttgaattatatccctcctatgtaaatcttatcttctacttaatcaatttaaaaaaagtatttgtatatcagcatcttttgttaagaggttatatgattgtgaaagaaaagaaggaggacagagtgaaatataatcgattaggcaatactggccaaccttttaatgaaactttattttgagttagtgtttttgtttcttcacctttaatgatgttgtcaaaggggatttaagaattgtttcagaagaatataacaattatccaataactaaattagaaaagcacatagaacataaatttgattgttaggatataagcaaagtagaaatagggggtggggagcgatgtggggaagaacgtcactttcttttgaaccaaatgaaaaacaaaaaaatagggagaaaaaaagtttaagaaattaggggattagaagtactcatatttgataatatctattgttcggggaactaactattttcaaagaagttttttttctttctaacaatagaattgttttagaaagtccgtttttaaatatgtttctattttttttattgaacggagaaagggacaacctattatttatctttgtgatagccccgcagaaatattttgccgtacaaaaaaaaaggataataaaaaaaaaaataagatattctcaaaggggtaaaagagaatgtgagtaataagaataacattagcgtaacttagtgtattatatgtgacttgtttaacaaaactagtcaatcattttattcaatattttaaaaaaacaggagtttcagagaacccctttggatattagaccaaacagatctttatgtaaaatattattgaattttgccgcaaaagtttatttccactctgtttaattttctttttgttgagcaacatagaaaactttttcttccttctttatagcttcgttggtttagtagccgtaattataaataaatagtgattaaccaaaaaaaaaaaagacttgttttttgtttaattgatctttaaactgattgtacacctaacagttaacttttactattttaaaaaaataaaaatattcaataatatttacctttagaagatattttaacaaaagacaaattgaataagaaaagaaaaaaagcaagcgattggatcctagtttatataggaacttgtaagtttcattcaaaaggattcaaaatattatgaaaaaaaggaagatctaaagaagttaaaggtaaataatttagttgcacttgtttcgtaattcaatgttattgactatggaatatataagtttttttaagtagatcgctatcgtatatatatatatatataatcattggtatttgttttgtcatggacaaataaaaataaaatgaatgggatacttgtattcttgggacaagaacgactgtacatttaaaaggaggaaacgtgtaattttaatgatacttagttagaacttaaggaatttatgttttagttagaaactgtaagaccttgagaagtgtagtattgctatatagatagttatgttcagcggtaaaatagcaaaaaggaaaagtcagaagatctctagtgtcgcttgtcataaatagtatggataaaatcatttacacaagtatgtatatatcaatatatacaacctttttctgtttcttctttaccttttttttatttacaggactgtggaagtactcttttttggtcttatcttacctcatctctttctttttcttgcttttcttttttttttaggtttatatataaaatttgtctttttctttaaaacattataggtttgtatttgtttctctttttaaatattcatctattttcgcaacattttctaaaaactcccttttcttttcagatttcctctttacattttgcatcttactctccatccgatgacttataaatggacgtgcaccgtacccgtactgtccatccaacattaggccagagaatatagtatccggtttatatttgttcgacccaacatttttttcttcttgagcttcactaaacttattcattttttcaataaatgacttattccaatggtcattttcgccgatagatggttcagatggccatataaacggttcttccatctcaatagtcattttcttgatttgaggacctctgtatcttccagcaaatggtgatactctcatatatttaccatgtaacaattgagtagtgatattcaatgctcttaacccatatacattgaacaaatagtcacgtaggtctaatttattaaaggatttaggaacaataaatttggcttgatatggcgtgtgtttagcattgggtcgcaataagatgatacgtgctttaggaaagaataattctttgccaccgactttgaaatgaggaattaagttactacctgttgaggttaaggaatcttttgtaatactactttgaatagcagatttagttctttccaaaatcttttcactaagggatttaactaatctgggcatgtctcaatcactaccacttattcgcttttttgataagttcttggagaaaataaaagattaattgctattcctatgttgctggtttcccacctattgaaatagtatctttttcgcttatttcttccttgattcatatttgtatcatacatttttgaagggaagaaatgatcattaaaaagctttagatgtccatagtttcctcgacaaaaacttctactttcgtttttagtgattttttcaagatactgaaaaaaaaaaacgtatatacataaaaacaaaaaataaatgaaaaagatatcaaaaagaaaaattgcctgaaaggttggtgtgtgtagttagacatattggtaggtaggttagtgttgtgatttgtacaccgtgagagcaaaatcaattaagattaactgtttgtttgagtttagttagggtgttactctttttgtctcttttttttttgtggtaataggaggaaacaaataaagagtaccgaggtcacataactcaacagtccttcgctgctagttctgattttttttaaccatttataccacctaattcattgcataaccctgagattttcattcttttctatcctacgttcatattatacagactttattgttttttccatttaacgccaataaaaataaaccctcgccctcattaaacctactttgcatttatatattccttgatatttttttaaaaaattaattgttttttattttcctattattgcaattgctcaaaagatgtttttcatcaaagatttatctttaaatatcactttacatccatcctattttggaccaagaatgaaacaattcttgaggagtaaattacttcaagaagtggaaggttcatgtacaggtaaatttggttatatcttatgtgtattagattatgataaaattgagattgaacgtggtagaatattgcccacagatggttcggcagaatttacagttaaatatagagctattgtttttaaaccatttaagggtgaagttgttgatggtacagtagtgtcttgttcacaacatggttttgaggttcaagtagggcccatgaaagtgtttgtcactaaacatttaatgcctcaggatttaactttcaatgctggatcaaaccctccatcttaccaaagttcagatgatgtgattaccataaagagtagaattagagtcaagattgagggttgtataagccaagttagctctatccacgctattgggagtatcaaggaagattatcttggtgctatttagattatctggatttatttttgggtattatgatttgttgtgcttcttccttttcattgacatttggtaagtaaaggcattaccaagtcatcactataatgaaaaaaaaattttgtcatatgtaataattattataataatatatttatgtatattagataacataaataattaaagataataaaaaaaaaagaatgaatattaatcaaaagaacactatactatacaaataaatattttattaattaaagattgtcaataaatttaatattctgaggaggaagtaattgacaaaaaatcacagaatcaggaaataaaagtatatatataaaaaaatagggttagaatcataattcattaaggataaagtgacctccctcacctgcttttaaacacgtgtcctcccaatggccttggaacttaccactggaaatagcacttttcacaacttcatgtttagtgagaaagtaacactcaggagaattcttatatattactctaacgacacagttatgccaaggagttggaatgtggagaagatcctcaaaagtaggttcaatcaactcatttaagtcacgaacaatacgacactgatctttagaaatgactttaaccccaaatttagggccactattagtatgggcgtgaatagaaattctgatatgatgtggaaacattaattcaacaagatttgaatatgcatcgtttcgttttatcatattgaaagcgatttttgaagtaatttttttaagttttttctttgaaaaatcttgaaagtaaggtaataacaatagatcttccatcataaatctagagaaacccctatacagatataatcgtgggtgaccatcagtagtaatttctcttctcaattttccagcatctgtgtcgcatcctttcatcaatatttgtcttgaaacatcactaatcgagcatattttagttcctgtaaaatggtcgacttcaacttcttttacccaagcagggtcaaattgttttgtagagataccgttgaagaaaatatcgtttaacccacaaaatccaatagcatcattatcttttgttctaatatgttcatacatttgatgaagcttactagtataatgacttacaatatcatcatcgacaccaatgcaatctgaaaaaacatggccatcactaacaatccaaaactttacacctggtgggtaaaaactttgaacttcttcagtagccttaattaatctttttaaagctaattcttcgcctttatctggtactgtaccgcaaactttgtttttattagaggatttacaaggaaaggctggcagaatacattctatccgcaaatgtctatctgtgaaatattttgtttttttgatgaaatagagtcttcccttctcttcccattgatcatcttccacagtattctttaaattggaggcaaaataatctgcaaataattcatgataagcaattgatttttgaaaaataagtttgtagttgttgttcaaacgactttggtctaagatatgaaaaatgaaccaacaattaaatgtatcttcaacttttgtatgagatattatccctcttatttgatcttcacctgatttcttatactcgtagatgattacactatagagttttttttcagttaatttttcaactatatcaccttcaatgctatatacttgaactgctttgctatgaactttcataggatgcgtattagtaatagcgttgtttttaaaagattcatgaaaagtgttccaatgactttcaaaatgacaagactccttttcttcaatattaaataacgttccagtactttgatctctagaatattgagctagaattttgctaaatgtagatgaatcacattgagtgtcttcatcttgctttttaccacattccgaaacacactcctttataatcaaaggacttttcggagtagtactgttatatgcaaataatttatcaataatagtcattttatttgctgaattactttagtttccttgaacctgagataatcaatgagagaagagacagttataactacgatcaaatgtcatttgtgagtcaaaaaaaaaagaaaaagaaaaaaagaatgactattagaagaattatatcaagattatagaatctaaatacacaaagtttgtgttgatatatatatatatatttgtgttaatgtttatttactttacatcaaaaaaaatttatgatttgaaatgggcttactgatagtcctttaaacatttttcctatttgaagggagcttatttgaaggtttgtgtttcttaagttatataacatgatagaagtaaagggtttggtacttctagtaattaattgagaatgtatagttcagcagtaagtatgagaagtacttcaaaattttttacatttcacttctaagaaaaaatcattcaagaattttatttttccccattcaagaatccagtcgagcgaaaacaaaacattaaaaatgtatttcataaaataaataaaaattaaggacattagggtcaactaactccttttgaatgcaaatgtaacactcaagcaaattaataagtatattttcacaaataattatattaaggaaataaatgatgataatttcctaaccctttttaaggcactaagtaattaagaaaataaaaaccctctgtcaataggtattaatagtataaacattgaagggtttacaaaaaaatttatatactttttaccttaataaaatcactaataacacttaaaaaaactaaaattaaagtgtaaagtatatactttgttatgtaatgtatatatatactcatatctatttactcatattaacagttaacctaaaaaaaaagaagaatatatattctttcccattctctaataatatttttttataataatgacagcaagagctttagttagcaaaaaccctacctattcctctatttatccattcattttttcttttcttcttaaaagatgttaaacacttttctttggaaatccatcctattctctctattaagtgtttttattttcatattaagaataattctacctccattaaactttccgaaaacaatcccaactattccattttatgtcatctttcttccttcaatatttgaaattgatcaaattgatatgttcaacatgtatttaagagaaccattagaaaaatatggtgctgtgaaaatgttttttggatcaaggtggaatattttggtctcgaggccagaatatttatcgcaaatctttaaagatgaaaatactttcgctaaaagtggaaatcaaaaaaagataccatatagtgttattgctgcttacactggtgacaacataattagcgcacatggcaatgtttggaaaaaatatagaagtattatgagtgatggcttacaaaattttaatgcttctccattagagaacaatgcaaaaaaattttgtaaattaattcaaaaaacattaaaaaatgaagtggctacttctaatgatcattcgggaaaaaatgaagccaatcaaaaaaaaaatcataataattttcttcctttattgattcaaagactagctttggataacatttcacaagttgttctaggatttgattttaaaacattggaagaagagtacaatccacttcatcaacatcttattagaattaaaaaacaaatatttaacccatttttcttaacattccctttctttgatttacttcatttaccacaaagacaaaaagcttttaaagatgtgaaaagttttagacatattttagttgaaaaagttagaaaagaagtgattgataattataattttgaacaaactaattttgttgtcaatgatttaattaaagcttataataatgagattatagattataaccagctaacagataacattgtaatcttgctagttgctggtcatgaaaatcctcaattactgatttcaacttgtctttatttattagccaagtactgtgacacttggcaactaaagatttggaatgagactaaaaatatcaaagatattgttggattaaaagaagcaccacttctttctgcttttgtttttgaagcaattagaatgtatccgccattaaatactataataaatagaaagactactaaaaagtgtcatttgagtaataacattataattccaaaagacacatatgttggatataataattttggaacaactcacagtctaaaacattggggcaaaactgctaatgattttgatccattacgatggggcacaacaattgacagtattaataccgaatggaaaagaagaaaaaacgaaggttctttaagtagttttcatggtggtagaagagcttgtcttggggaaaagttggccttaatcgaagtgaaagtaacaataagagaggtattgaaaaatttcaatgtcaaattatccaaagattggaaagaaagaatgacttctggtggacctctttgcccctccgacctaaaattagatttttttgaaagagaacaaaaaaattgattaaataagtcctgttagttctgacacaacaaatactcccttatataaaagagcatagcttcttatggtgcataatccagaaaaaaaactaagacaaaatctaacattaaaaacaaacaaaaaaatatttacattctagatatatacagatatatatatacaaatacatatttaaatattttgaaaaaaaacgaggaaaagaagaaaaaaaggtaactaaacagcaaccaaatcactctaaagtatcctttattaaccttcaattgttgaagatttctgagccagcgtcaaacaattgagtatttgtttccaaaaataatcaatattaatatcgtacccaataatcacaccaggacttgtagttaagttttgatactgcacaccatcctcatattcatcatcacttgattggaatgggtcatcatattcttttatagaaaaaatcattcctgcatcctcactgttcaaatccgtaatgatgtcgatatccattttcatatatttgaatcccacaacatcacttgattcatagttataaaattgtaacaaggggtaaagagtcattggatcatgtatgggtggaccattggtaaaaccttgaacatctttatatgttttttggaaaaacaaaaataattcatagaatagagtcctcaacttctccttatgtagttgtggtggatatattttctcttcaatgatctctttagtggcgatagccttatgtgtcaaatttaatggtgataaaatacattttggggctattaatggattagttaatacaaattctgccgcgtgtggatctatccaaatattaaactctgcagattgatttggatttttattacctaatccattgaatgaaccgcccataatacttataaacctgattttatctattagatctggctttagtctcaataaattagccaccgatgtcactgcaccagtagagattaaagatatctctccttcatgttttaaaatggcttgttccatagcatctaaataggtcatatcactacatgcttctctttctggtactggtaataatgtggtaccatccaacccagtctcaccatggatatctggtgcatattttaaatcttttctgacccaaggtttttgtgctccacgatatatagggatggtattgattttattcattgcagtcaataatgaccttgcattataatcagtattatctggagatgaattaccaaaacatgtagatattcctaataggttgaatgcaggatgaaaacatgccaaaagaatggcgatagcatcgtcatggccagggtcacagtctaaccatattgggatggtggaaatggtcatgtttaaaatagtatgttataaaatagatggttggcgatttatacacgaataattattcaatataagtctctttgctcaaacttcgttgtcccttttctaaatactaaaataatcaatttcactattctttgtagacatcaactttcacccccgtgtaactgacacaaaacacaatgttacttttaattcttttgtaatgttcgatttaagcctcatccggaaacaagtttccgccatcccgccaaaaaaaaaaagataaattgaattgtttgtgtagatgatagttattatatggacataagaggcccatattcatagaaaccagaagagctttatatgtttcaatacatacggtgatcatcaatagaccaggctagactagacttactaaaatcatcttcaatgaccaacctaaccaaaaaaatttgataaactatctttatcaggccaaaaatttattaataagtgcttctgagccatttcttccaaatgctagatttttgcaaaaagaagactaaccggtattctctaaattcgaaatactcaaggtcctactttttacacacatagtctttgcaaataaattaaaaataaaagttgacagtttttttgttagttagtcaaagcctgtgaagtcctgagaatctgtatgagctgtgtgacacatatcttttttcagcaatttttcttttttttttatttcaaatgatcccaagttatcagagacagaaattaataacagagttttgcagttcaaaaaatattttgaagagggttctaaaatcattattatcattttcaaaagatgaatagaaactaccaaataatctctatgttaattattatattatacctacattatttggtgatttaaaataacgaacaaggaatagtttacatacctttatgtgttgagtacaccccaagtgaatacaaagaaagtgtaaatgtatatatatgtgttacaataaaataagatattacatatcatatattatatattattattattactatacatagatttccttttattcaatccccttctaattttcaaatatacaatgctatataatacatactaagtataactaattataaatacaaacacaatcaaatataaaagtgagattaaatggaaagggggagggggaagaaatgtgtgataggaagaattttgttgctattttattgttctgcttgaagttcactttcatcctcgaagaaaatgtcgttaccttgtttaatagccatctttgtatgataaacaatatcggtagattcccaagggtaggcaaaccatttatctggtacttgtttaccagcaaaataacgattttcgtctaataagatttcatctggcaagtctgccttctttggtttcaatttatcgtgtaacacaaagataccaaattttgttttcaattctggattcttttcgaaatcgactccctttgccttagcttgttcttcgacatccttttctaattcatgtagagcgtagtgtaaagttgttcttgtatcgtcaacttcatctacaataagaacgtttttgcctattaaatccaatttacattgttcataatcgatccattggattctattgattttaacaccaattttttcagcttcatcaccaacagctgtatgtatatcttcatatagagataatatgatagcgaagattctaatagttgaaacaccgggctctttcaaaaaagttcttaagattctagcaggaatgaaaccaccaccaccgatggcaataattaagtctggtttaaagttcttgatttttttggctgttatttggcatagttgatgaacgttattatacgatatatactgcttttcgtcactcatcttttttcttttattataattttttgttatactttttccaatttgtttatcttaactaagatagtgataggattaaaatagacagacaactttgctacctcagttactatttcttaatcttctaatgaaatagatacaaccaggaaaagtacaagaccagaaattaggaagaaagaaggatctgagtgttcttatccatgtttcgatttaaaaaagcaaaaaaaaaaaaataaaagaaagagtatcataaaaaaaaaccattgctaacaaaaagaaaaaatagctaaagagaactaacagacaaactatttcttcattataatatagaactttgggcagagtaaaaacaaaaaaaaaaaagaaagagaagaaaaatattaacatatgtgtattaatattaaaaaaaattaaaaatttgaagaagtagatagtcaattaaatattaaaataataggatataattaaaattgaagaagaagtcaagtccttcgaacaaaagaaagacaacatgttcatctacaaaaaaaaaaaattttttataacaaaaaagaaaaagaaaagaacagaaaaagagaaaaaaaaactggaaaaataaattcttttttttttcttttctttttcacctttaatctcatcgctcatcgcatttgcaatcgcgtttgcaagagtaaaaaaagagaaatgagaaaatttttacaaaaacaataatctttttggttttgcgagagacataaaataattctcctcttttacttttacgtttacttctaactgaccatctgagttagggtattattgataatgtagaaaactttctttaaaggtatcaagggtttgtcttttaattctcttctcattgccctattctctatttttacatagcttgtcatctaagaaagtgaaacacaatatgtatatatatatatacatatatatacatatgacattagctgttcaatctacaagaaactatatacctaaaagttgtgattaatcatattacccactccaaacgtcttgtttacattttcagttacctttatttaacagtttcttgtacatttcgtccttttttttttctgttttcaccaatccaccaaaaagcagtactttttctcaaaattgtcgtttcttttttctttttctgttttattttttttttttcttgcagagagttttgctttgctttgctttttattccccttcccctgtttcgtctggctttctcttctcttctcttcttttttttatttttatttttatttttatttttattctttttttttatttttttgatttctgaataggtaagaggtccaactataaaaaggatgaaggactgtagaagagtctggaagaaggaaagttacaaagaaaaaaaaaacaaaaactgagctctcccgtcttcttctgtgagaaatagtaaataatcggttatttcccaattttcgttcctgtgcccttgttttcctcctcatatttttatcttgatgcttgggaaatacaaatatattcttgatcaaccctagcttttattcttgtggctgttgtttatattcattcctctctgtttacatacaaacaaacatatatatatatatatatatagtctttttttttttttttggtcagatataaggtactttattgttattactaaaaaaagaaaaagaaaatcaagatttaaagatataaacaaacgtgtaaataggtgaatttaaacatataataaacattatatcaataatacgatatatatccgcattcaaacatatattggattccataatggcaggtttagataaagatgatatatctttgcctaaggcgactgtacaaaaactgataaccgagattttagatgatgatttgacttttaataaggacgcaagagaaattgtaattaaatccggcatagaattcttaatgattttatcttcaatgtcttctgaaatggcagaaaatgattcgaaaaagactatcgctcctgaacatgtcttggctgcattgaaagaattggaatatgattcttttgtaccgttgttagaacacgctctaactgaattcaaaggtacacaaaggataagagaaagaagggatagtaaatttagaaactctggattaaccgaagaagaattgctacgacaacaagaagaactatttagaaaatctagatctaagttacatcaaacaacagcaacaacaacaacaccaataccagtaccagataatcatatgaacaatacatcgaccattaaagaagaaaattgatacacaaacacaaatacaaatacatatacatacaagtatacatatacgtatatatataatctacatgtttaatatgatatacaaaaacacatttatgtttaattacttccaatttttttctttttttttttttttgatttctgtcatttatttacttattcattccctttctataccttttcattctatcatatgtatatatatttacatcattatcttacacaaatattccttttttattttttatttcttattttttatttttactgttgattcttttctgaaacgaaatttaatatcacttctaaagatgatttgttttcttcagttaatgaattaataatctcttcatatcttactgcattattattctttaataattggaagaattgataaacttcattaaatgaattaattccatctaatggtgtctccttgaagtcatcttctaaatcttcatagaatgcatcttcttcttctggattcaaatcatcaatgttactttcttcagcaccacccgtttcatcaccattaccttcacttatcaattggtgtcttctgatagcctttggtaattgctccactaatttgactaacttattcgcaaatgcattaacaaacccaataacagatccaggtaaatcagtcatctgtaaaaagtttaaaatggccataatttgtaatttaatgccaaatacactagtcaaagaacagtcaaaccatatcttaaaaaaatctaatgtaattccattggattccattatacttaaagtctctgctggcttaattgataaatatgccaggaataatttcactaactccttttgatccacacccaactcttcttgacgtgcaaaaccaaatttgatacattcatcaaataatgggatatccttcatagataatgcatacatttgtaatatcattaacacactatccacatcatagtctatctcactttgtaactttacagacaaaacttgtaaaaatgggttgacgaaagtctgatcttgtggaaaaccaaataatacaacagtttcaaaaaatacttcgtatgattcaaaataatctaatgcataagtctcaaaagaatccataacatcatgaaataaatcccaaatctctggtgtaaattgattatatagggtcttcgaagataatgctaacgcatccatcaaatccacaatttctgtcaaaagaatgatttgtgcgttttgaataacaaacttacaaactggcacaaactgtgtggtcaaagaaactttattcattgacataaccattgtagtcatagtctgtaacaacgaacttgcctgaatttcttgatcttgatcacccattgagtatgcattaccgctggaactactacctccattgttttcaaccatagaacgcgccactttaagaaattgttcagcaagattggatgctaaatcgttggcaaatggtgtcaattcatcagagaacctttcaacaagagcctccataacctcagcaatagtatcaatctcaaattcttttgataattttaataatctctccattatgcctggaacttgagaggaaatgtgaggatggatatctgggttggaaacaaccagagtcttcaatgcatctgcagcttcaatctgaattggtaaaattgtactgtttaaaagatgattatatgtcatttcataaatcatcgataaagtttccatgttagtaaatgttgaatcaaaattagctatggtttcaagtcctcttgccaccaaaaatggatatttatcttgtcctataatcttactaataaaatgagcaaaaagtccctctatagcttctgtatttgaatcaaaaaaactaaatagagtagaaatcattctcatagcaccttcttgtttataagcattctctaaagttggtgaagaaacaaattcatttaaaacattgtttacaaatggcaatactatatttaatttttctggacgcttatgaccaacaacaaatatgaaatcgactgcagctacatctgcagtactaccttctttgttcatatcaaagtaacgtcttgtgtattcctcttcatcatcctgtaataattccacagattgaggtgatgcacataaacaagtaaaaataacattttcaatgaaaacttgtaaatgaggttcaattagagaatataatccatcataaatcaaacatttttcaaacaattgaaccaaatagtataatgacgattcacttaaccataaagaaccctccttccaactttgaataatcttgaaatattcttggataatttctggacataaattattatagatatattgaacaagctcttcactaatctgttttgtagatcttgaatatctgtgaatgaatttatttagattaccaaatccccatttattgactttaaccctcttatctaatgatctatcagcataatccaactctagaacttcctttggtaatggttttgcacaaataaatagatgtaatttgatccaagaattcaatttttccatatcgttaaaatattgtggatagttatttaaacaagcatacttaaacgattttaagatcaaatataataattcacttgatttgtaatcagtctctgataccaaattagataaaagagtttcaatagttggaaaaacagttattataaaattatcgatctggtctctcttcccagtcatatcatatctatgagcagaacacatttcaaagactaataataaacctgcatatatgtattcagacttaccagtatttaacaattcaataacagtagaagataaatcccatgatgtagatctagtcaaaatatatttaatagcttctgcaagatgaggtctgatatgattgttttcacaattgttaattaagattggaatgatgttttcttttatcatatttccttcatcctccctaatatcaccaatatgaaccttttcatttgaattttcagtcctccatgatctttgaactttgttcttaaaataaatagctgcagacattcttacatttaatgcaatatcttgattagacacaatttttagtaaaaagacagtgaatcctgcctctttttcaatttcatataattgtaattcagcagccctaatgactctggcatcagcaaccatagtatgctcaatgcatgatagaatggcttgctcatctaacatcttgacagaaagatcctattacaactatttcaaagtacaatagaatgctcctcttctctttttatttttctagtagttgtcagagctgtaaacgatatgaattagtcatccatgcaaaacctttaataaaagttgatggaaaagcaactctatacctataaaataacaaacaacagcgtgcttaatagaagtgaaaatattacgaaagacgccaaataattacttcttttcgtttaccttcatcgctttctttcttttttttttttttttcaaattttgttttgtttttaataaaaaagaaaaaaaaaaaatttttaaaatttctaacaaaaagttgaaacctgaaagggcacgtgatcttcaagtaattattgcgaaaaataggcggctttagtcgaaatatatttattaagctgagaatctgctttcttcattgaatttaaaaagcttaaagatcaataaagatccaattgactaacacatcataccatatgaggacaatttaaggtttagcaaactataaaatatctcaaaagctagatcactaacagggaaattaggattcaatatcgttattgttactccatcctcatataaagcctaaacaaataaaaataactaaaagaaatatctatatatatatatatacgactagcaaagaaaaaaaagagaaggaatggcatgctaccgaaactaaaatctttaacttattggggttacgtcttcggtttgcttattgctatacagccatcatatattcatagcgatgaacattttcaaaccatagagatcctagcacaaaagtttggtggtatcaagggaacaatctcgtgggaattccaaggtgaatatcctgctagaagtcttgtaccattgtatttgtattatggaccattatattttgtattattcaaagttttgaatattcaggatccaactattatcctatctttggttagattacaacattatttgtcatatgttgttatttataaatggtttcttaaacagtttggtgttcctaaaacagtacattatattgaatttttaatttctacctcatatattacatatacaatacagagtcattcattctcaaattcaatagaaactttaatattattaagtgttttggtttgttataaaaatctgttatcgttgtatccatccaacaataatgatattaataaagataatgtacatagaaaaaaataccttaccaatattttagttgcatttttaattgtaatcggtatattcaatagaatgactttccccgcatttatcttattaccgtcgctcactttattttctagatattatatccatcagtggaaaagttttcttttatttagtattacgggctttattacatttttatgttgtattcagcttgatacatggagttttaatcttaatcaatcaaatatatcgtatccttatgttttagctccttggaataatcttaaatataacctagagacgtctaatttaaaattacatggtttacatcccagatacacccatatcttagtgaacatgcctcaaatacttggacctggattatatctagtgtataccgagatcaaaaaacataaatttaatcaattaaatagttgtaatctgccacttttgtcaatcataagtgctttatttattctttccattttccctcatcaagaattaaggtttttggtcccattgactccattaatttttctcgcattcaacaatgttccttgtaaaagatgggtctcgatttggttattgtataatataataatggctatgattctgggatgtttccatcagagtggagttataaaaatgatgatgtattatcaacaaaataaagaaagaaccacagattttggtgtacatgtatggtggaaaacttatatgcctcccacatggatgtacatgaattcgaatataactgtatcaacaacaaaattaattaatggtacaatagagacattggattttgatgaaatcatatcagttaatcaaaatcatgtaattgatctaaaaggttgtaacttaagtttattaaattctactataaatcaactattgattaaaaatgaaaatataactttaattgcacctgattcagtgaggtcaaaattgtttactttaaaatcatattataatataactgataattttcatacttatgcacatctagatcttgatcatttcaattttaatgatatatcgtcgtttactccaggcttagcatcatatcatatttcatatattaaagaacgaagaaaacaagaaagaataactgaatccaaactttgaaaggtacatgtcaaatatctgtataaaaaaagagatgaatatgccaccatactaacagcctacaatactataaacataaaagtatatctaaatcaatagtaaaatatttagcttttttttttacaaggaatacatgtgaaaatatatttataatatgtaaacttacatatcatcatgtacacctatatatatttatctgtatgtacttatgtcattagtagaaaatggcttaaaacagacgcaataaatagtaaatcatttatagaaatcaaatttatctacgtcactatctgttttaacttgagatgcatatgcttcttctaaatcactttgtaaaataacatatctatttctccttacagctcttaacccagcttcttgcataattgcagcaatgacagcaccagataatgcgtcattacgaatgatcaaagagtccaaatcgacttctggtgctaaagacatctttgatgcaattgttccaaatattaaacgacgctcacgtctatcacgtaaggatggaaattctatctttctgtctaatctacctggtcttaatagagcaggatccaacgtatctgctctattggtggccataatgaccttaacgtttgttgattgatcaaaaccatccatttgtgttaataattcaatcaatatacgctgtacttcacgatctgaaccagtttgtgcatcaaaacgctttgtggcaattgaatctacttcatcgataaagatgatagatggtgcattttctcttgctaatctaaacacatcacgaaccattcttggaccttcaccaagatatttatgaacaaattctgacccattaactctaataaaagatgcttttgtactatttgctacagctttaaccaacatagtcttccctgtaccaggtggaccatataataaaacgcctcttggtggatcaataccgatttgttcatataaatcagcctgagtcaatggtaattcaactgcttctctaatttcttgtttctgcatatccaaaccaccaacatcagcatatgtcacatcaggtttttcattgtcacccatcacagatatatttgaatcagaatctggtggcaaaatatctactaaggcattagagtgacgatgtaatgcgacagacatagaaggtttcaataattctctatctaaagtagataatatcctgaccacatagttcataccagttgtacttgaaacgatcccagtgttttcatcgataggctctaagaattgaccaatgaccaaaggaacagactgaattctttttacttcttcttgtgctcttaataattctctctttaaatgacgttgttcatccttgatataatcttcttgtagaattaatagttcatattctttctccaatttctttagttttaagtaaatatctgaattggcggtattcccgtacaatgaattgctgttgaccttggataatatgtccttatttaattcagataacaaagaaccataagttttaatgttagatagctttgattccactactgtttctgagttattagtaattcccaattcttccattattacgtctaagtaattatttatttatatgtgtgcgtgtacttcaatcttaaaatagaacaagtttattttattttatcctttttttttttttaattggttagtacttatactatataatcttttaaacctagtgatagtagtgtgtattctcattacttcttgcttcttattttttgttattctatttttatttttgttgttagtttttttttccttcttattgccaccaaactgatttctccctctataaaagaaacaggaaaatagcgaaagaaacgcagaaagagaattttctctatggttcacccaactttaaagaagtggtgttttttgaagagagtaagtcaaactgtgttgaaatgtaagtgagtgagaagtttaaataggtccatttattcgtatatatatttatatgtttatatgtctccataacatctatgcattttatagaattggtctaaattagcttgtacacaataatagttagcaagtttcctaagagtaataatgtaccagagaatatatatatttcaatattattgaattctagattccttttttttggaatttgagtcaatttggaataaagttgtttaaagaccacatatggatttatatcttgattcaaactttgagcttctttataataatcatttttgttattattcatctctttcttgtcctcttgcatctcgtactgctggttactatcgtcaactagcaccacttgtcttgtagatgaggataacattttttctatttttattgatatcaaattttcttgttcctttgaatatgtgtttaaagcaaccttaactttatcctcaaaactacgtgtcaatctccttcttttccatggttctaacaacagttggaatatcaagaaaagacatatattgatcaccatcaatataaacgtaccccatgtggaagttcttctaatcttgtctgaccagatttgttcttcatgatatctagtcaatatggacttatataattcgttagtcaatctatcttcctccatttcaatggcattcaattcttgtttgcattcttctactctctttgaattaattgtatcttctttatataatctggtaaatctttccaaatcctcacttgaccatgtcccctttctttgtaaaagatcattaacttcattctgagattgaatcctctggctgattgcatcattatacatttttttgctctctttgacttttaatttgattgaattcaactcattctccatctgatttattgagtttctcaaattctgtatacttgaatatccggtgacatcatttaatgccctagtggctgtaaataaagtttcctgcaatgaatccaggtaaaattccaattttcttgaccataatttcctcctatactcaatctctgatggtaacaataatccattaaattttgagttattagtgtgtgtattgctatgtgtattattattattatacgttttcttgaattgggcttcttgttccataatctttctgtttgcttcctttaatgatactttcaatttactaaagtgattattaaactgtacacaataatttattgtaatctgtttgatgttattaaattgttgttttaaattagatagtaacttatcattcttctgagtggaagtacatctggtatttgaagcatgtaagtatctaattgactgatgatgcgtgtcgaacctataaatataatttctcaagatcagattgagcatattctttttcttatagaaacctaataaagaagcaacgtttcttgtctttatgtgatttgtattatataatcgtaacatatctctttaaagtgtaaatgtatataaccaatcacatttactgatccatttacttacctattctgcacttcttttcttttcttttataatatatatatattcttatcttttatgatatgtacaaacgtgcatacatacatacatacatatatataataaaaagttattttatctcagtatcgaccgactaaagtatactacatagtcaaatgcacattgctttgctttcttttgtatcttcagtcagtttatatatttctcgaccaaactttttatttaattttctttgtttcagcactaattaaaataaattagaaaataagatatatatatttatatatctatgtgtgtgcgtatataaatctgaccatagaatattatataaacaggaagagagagaaagcgaatgtctttgacatcaaatcgttatatttttgcaaaaatgaagaggtattcaggaacaccattcgaagaatctgctttaaaaattatatatacaataactagcattagaatgccatcaagaaagtactgtcacggcaaattatctttcaattgtaagaaagtgaccttttttcttatatacaggactagagtagttactaaaactgatttaataccttatccattattaaatagataaaaaaagataccttttgttatgttatcttcatcttgatgttgatttgattagtgtcattgaacagtatttggttagtgatgacaagaacacacatcttggatagtttagaaaattatttagtatctgaacaatcttagtgtctaggcatcttctaaattaaattaacttggtacgttgttgcaatggtatactgaaagtactgcatgtcagagacctctgaccatgatggtttcatcttcaatatatctgtccctaatatacaaaaaagtagatgccattgctttcagttacgctgttttttctttgtgtgtatggtgtggtgtgtggatgtacagacatcgagggacagatgacagtaggaaaaaaaaaaaagcaattctgatggtaaaatttttcttcatgatgaaaatttgtttcaattgtaaggaaaaaggtatctcatctcatcgcatctaaccaaaatgtgtttacctctttcttatattggcagatacacgtcgttattatcagtattaataatcccttctttaagagttataagttaccgtatctttatttgcagattactgttgttaagcttccgataatattcaaccaatatttatattaaaccttaacttacctcatatacccattttaccccataccatcttctttttctttttcttttatctatctcactctattcgatacacatatacaattatacatatccatttgatttgatacacttttattattattattattattattattattattattattattattaaaaaatatggtggcccccactgctctcaagaaatcttctgataatgcagctaacaactccagttccactacaaatactgcttctactgcaagcagaattatagggatcgataacacaaaatctcttgaaaatgatgatgacgacgacgacgatattttattagatcaagatatggaacaacaaaatacagaactacagaatttagaacaagacatagtacaaaaaaaaaaggaagttaagggcatcatatttgatgagcaaggcaaaccaaagtttggttctgcaaatgatgccaagaacacgaagattaaattagagagtaggaaagttccagttccaccacatagaatgactcccttgagaaacaattggaccaaaatatatcctccattagttgaccatttgaaactacaagttagaatgaatctaaaaacaaagactgttgaattaagaacacatccaaaacatactgtagaccctggtgctttacagaagggtgctgatttcatcaaagctttcactttaggtttcgatttggatgatgccattgctctattaagattagatgatttatatattgagacttttgaaattaaagatgttaagactttgactggtaatcatttagcaagagccatcggtcgtattgctggtaaagatggtaagaccaaatttgctattgaaaatgcaacaagaactagaatcgttttagctgatagtaaaatacatatacttggtggattcacccatattagaatggctagagaggctgtggtcagtttgattcttgggtccccaccaggtaaagtttatggtaatttacgtattgtcgcatctagattaaaagaacgctattaattgcattcacattttcttcttctccctacttctctaaatctttctattcactcattacacacacataatatacatacatatcatttctattgtctgtattttgtagtcttttttttttctgtataatagaatatttatattagtgtggaatatacatacaatatacacatcatcatggttttgacaaaaaaaaaggagaaattacttagcaaaataacataattaatggtaatttctatatatataatgaacatcaataccattctcataaacttttccaatctcttctaatgttaaccccttcacttctggataacaaaaatatacaaataaccatgtaaatattgtaaaaatagcaaacagtaacattaaatcttcatcaccaactttatccaacaaacttaaaaatgttgatgatataagaaagttagttaaccaatttgtacacgatatacatgatgccccaaatgatcttctatttaaaggcaaaaattcaactgatgaccatggaatagaccccatccctaatgcatatccaccaacaaatattgttattgatactattaatattgtaacgttatttcttgcaaatcccatagtagaaagtaataacccaaatgtcattatccatattgtatataataacattaatcttttcccatatatatcaacatattttagtgctaaaaaagtgaaaataaaatttattaaagcaacaataattgatggtaggattggattattaattgagtcgaatctttgaaaaattattggagaataatacatgaatgcattaaaaccagttatctgttgaaagaacattaatgtacaaccgacaaataatgctcttttagcttttggttccattctatgtctttgtttctttctgttataatgttttttattgttttgtagtggagttgtttcagactcagtactactatcagcactattatcaactatatcactaaatgataatgccatattttcattacgtgtgacaatagtcgttactaattgatcatatacactgtttctcttcaaatgagtggtgtgaattctatttaattctggtttatcttgatatttataaattatgctcaaatcattaacaatcttttgtaaaattaaatttaattgatatgtatcagcctttggataaacaatgtccaataccattaaagcctctttatacttcttttgcattactaaccagcgtggtgattctggtataaaatctaagatcagaaggaaaaaaaatgcaggaacacaagataacataaataatactctccaaaattgtttattttcaatattgtaataacgataatcaaaaccaaatgcaattaaatatgcgagtaattgccctcctgttattgcaatagagttcaataccagaatagtggctctaatccttgcaggtgatatttctgttaaataaattggtacacattgtgcagagattccaattgcaataccaacaataaaccttccaattatcaaccaacttaaagttatggaaaatcccatccaaaaagcagccaagataaaaataatacagcatatagacattgaaatttttctcccgaatttatctgctaagggaaaggctaatattgaaccaagaaaagatccaacactagtaattgaggttatgatctccttatgccagtctgtcaaatctgctcgattcaaatcgtcggccttcagattaattaaaacaccagatatgacacctgtatcataaccaaataatagcccacctacagttgctcctactaaaataagtacggttctcaaattaaaattatacggcaatgaatcaatgtcattgattgtagtagatgtaatttgcgataatgtagaataacaatcacaataaatatcttcagtttcacaaccttgggttgattgatccatgatcctttaacactatactcctatctctcttttacttcctgtctctctatttatcctttctatggtagtcaataaataagaacaaaagtgcatatatatatatatatatatttacatatattcttggtgtgaataaactaatttaccgccttttcctatttcaaaataactcatctaattaactataatgcagcataacagacaacagatcacactgagagattctgttcaattgaactattaaatcagaaaattcgaatctaacataaacaattaaagcactgaaacgagtcttccaaaaccacacctatagtaatgagaaatgcttgactgcttgattcattaacctctactgaaggtaaaactgccttatctcttaatatacgtagaatttctctagagaatgaaataaaaataaagaaaaccctaaagaaaacaaaatctggaaatggtaatattagaacatacttctaaaaacctaatttatatttctttttttacaacggctgattatttttatcttaaaggctttatttttttttataatgttttttttattctttgtttttatttttgttgtttttcccataggcagtgatgcaaggaaaatgggggcaggtaatcagatgggctttgtaaaatattaagatggatggaaagaagaataaaaaggaattattgagagaataccgatatattccaatagttattcaagcattttcagtagattttaactctaacactcacagcttcttttagcttttttagtgtacgtttgctactaagtcattctagtagagtaattgtagttggcctaataacaaattacacctattaacattaccatttatttatttttctttgcaggattaccacattttaaggcatatacagaatatcttagtgctattgaccaaaaattattatcaatctaagaaaaataaacaaaaaaaatgagtttcaaaggttttactaaagcaattgttagagcaccccaaagtttccgtcaaaaatttaaaatgggggagcaaacaatagatccagtctacgaagatgcagaacgtagattcaaagaattagaaactgatactaaaaaattaagtgaagaatctaaacgttatagtaatgcagtcaatgggatgttaacccatcaaataggatttgctaaagccatggaagagattttcaaaccaattagtggtaaaatgagtgaccctaatgccactatccctgaagataatccacaaggtattgaagcaagtgagcaatatagagccgtagtggcagaattacaagaaacattgaaacctgacttagctttaattgaggacaaagttgttaaaccatgtcaagaattattaaagattattacatacattcgtaaaatggcaacaaagagaaatcataaaaaattagacttagatagaagattaaatactgtcaataaatatcaaaataaaaaggaacctactgctaaggatgaagaaagattatataaagctcaagctgaaatggaagtggcccaacaagaatatgattattataatgaaatgttaaagaatcaattacctattcttttcagtctagaagcacagtttgttcaacctttatttgtttccttttattatatgcaattaaacatcttttatacactttacaataaattccaagatatgaagattccatatttcgacttaaatagtgatattgtcgaagcttttattgcgaagagaggcaatgttgaagaacaaactgatgcattaactatcacacattttaagatcggctattctaaagccaaactagaaatgactaaaaaacgttacgcttctggtaatgagactccaggtgcatatggggccagtagtcctagcctatccaccccagggtttggtaatagtcaatcacctatgggatatgaccaagctgcacaacaaggtcataataacccaatgtcaccacctatgggatatggtcaagttcaacaaccacaacaaccaaacatgatgatgaacaataccatgcctccaccatatagtaatcctgccggtattgctactggtagtacattacctaagacagagactgtaacggcactatatgagtatcaagcacaagctgaaggtgatttatccttccctgctggtgcagttattgaagttgttcagcgttcagcagatgttaatgactggtggacaggtagatataatggtcaacaaggtttatttcctggtaactatgtccagttgaatcaataaaaaaaagaatatacacgtctatttcaactttatttttgtatttttctactaacatttaaaatatatatttttttttcttttaattaacaaaaacttttagcataccttcttcccaatttctatatttatgctctcttgtatgtttatttaaagtatatatgataatgtagtcactatatgtatatggataaactatacatgataagtactattgacatgaattcatttggttaattaaaagaagattaataatttcactaaattgctctagtgatatgatactgtaagattcagccttctgtaatccctcatcaaacttcttaatgtctggacaaatgaaaatataaacataaatataaatatataaggttatatttttgtaaattcagttgaagcaaggttaaaaagtttttaagattagggctatttaaaaaattacaagtgactttcttaaaaaaaaaggaaaaaaaaacaatataaaaaaaagaggagtaatggcgtgggtagtcattctttacgaaccactccttattcttgtccaaaaaaaatgtgaatcgacttttttttttcacacacatatatttttttttatcacaattgactttatcagtaacacaggtttctattttaagaatttttggcactcacattagggtttctgcaagtcttactcaaaatgtttttttttttcaaaaataaaagaaaaccataaaataataacaatgagattgaaaaaaaattaaaaaattaaaaaaaaaaaaataaaaaggaaaaaaggaaaaaacaaattaaaaaaagaattagaaaattagcctctaaaaatgaaacaatagaataaggctggacttaacttcctatcttggtagggtattccctattgtggaagtcaattatatgttttggccactttatactcttcttgggaagttatcttccaattaggaaatcccatgccgcttctttagatattcctgttaatttattttctacttttgcacaataagagaacgcagatttggcaaatttcaacaatttgcaattctctttttgggtctctcttccctgcaaagcaacgatactttcagaaataaggcatctaatgctattaaccttatatctgttcattcttgaattgaattggaagaaagactttatatagttactagatttctatttagtaaaacatttgttactcgtgacttaaggtcaaactagctccttcacagtcctttattcctttgcttcgtctttgataactaagaaacattttatttatttgttttttatttctcacctcaagtccctttttaaaagagattaagttgaagaaacaaaataagacgaaatattattgttaaaatccatcttcagaaataaactctttccaactttaatttataatattttggttttgcatagtctcacaattagcatttaccatttaaagagaaactactaattggcctagagtatttttagaaacaactaataattgaaataataaaccatcacttagaaaatttccataatattatcgttatttccccctttatatgctcagttgaattcttatactcttatccaccgctgtctcccaatattattaaagtcaaaagttagatctaatagtcaaagtgtcatcacatccacctgtcttgtaatatatctgcgaacactaattaaggcaaatttcacaaggcttgtttttttctttttctttttttttcttaattaaagcgaagatacataacactaaaaaaagaaaagcattgacaccgtgaaaataatctatacatccatatttacatccatattctaaaggtgaaagtatgccacaattttggaaacaatttattaataaccccaagagtgtgtcaactgactctatccctgtaccgtcacgaaaaaattctgactctactagtgctaatctatctacatctataccttcagtgaaaaaactttccactattacagccaatgctacaactactacaactactacctcagcaattgcaactgctaatttacactcgaataaaaccacttccactgcatctccacctagagtaaggccgattctctccacaagaccaaactcttttcacacgtcctcaagtcataatgtaaaaactaatttctatagcaatactaatagattaagttctcatgttgtcaccacaaaaactgatgattataaggtctatagagataccttcttaaacaataagaatggatttaatggacatgttttcggtgtgtctttatctgattcactatctgctgcatctgctgaagtcattgtgcaaagtgaattagtcagctttggtagaatacctatcgtagtcgctaagtgtggtgctttcttaaaatcaaatgggttagaaacttcagggatatttagaattgccggaaattctaaacgtgttaaagaattgcaatacattttctctcatggacccgactatggttcaaaatttaataattgggatggttatagtgtacatgacgtagcatctttattgcgaagatttttaaataatttacaagaaccgttaattccactttctttatatgaagattttagaaatcctttaagaaatagacctagaatactgaaacatatggcactacatcatgtatcacacccaagtgcagataagacgaattctttgtcgttaaagatggttgaagatagagataatagtaacaaaaatactgctactactactactaataataatagtaaagatacaagtaataataaggataccaagaaaagtatccctacagaaaatatatgtagtaaagttgataattcaaaatcaggtcaagagaatccaattactccatctgaaacaattaataataataatattcctgaagaaagtataaataaagagaatgtgttagacaaacccaatgacactaataaacaatcaacacaaaatgataattcacaagagaaacaaaagacaactacagaaaacaataatactgctttgaaagaaaacaataataaagaaacaaaagaggagcagaaaggagaaaatgaaggtgagatcgatgaagaagaattacaaagaaagaaaaaacttcgtcatagaaaaaaattgagtagagatattcgggcagctttaaaagactatgaaactttattcatacatttaaataacgatacaaaacaactgaccatatatctcttagatcttttgtctttatttgccaggcaatcacaatttaatctaatgtctgcaagaaatctagcagcaatattccaaccttcctttctatctcatccacaacatgatatggatccaaaagaatacgaattgtcccgttttgtagtggaattccttatagaatattcctataaattattacctcgtcttttgaagatagctaaaaaggagcagcaagaaagatcaagcagccacatgaataatcaaaataataatagtgtggaatcgttgacatccataaagccatctttggaacaacattcctcccccttgaaaaacaacgttacaccaccgagagtgactatcaatgattctgaaaccaataaatcttttgatgttgtcactcctaagcaaccttctgcgaaaagatcatcatcttctctgaaaccacctactgtatcatcagcatctcagctgcgacctcaataccccaagaacattattagaaggccgcattctagatcgattggttcagcgcctactccacctgacatgatagttagtaaccgaagaagaactacgttatttccttggttacataagccaggtttcttaagtgatgcgggtgattctactacaactgaaatagaagatgtagacgatgatctcgatgatgatactaattctccaaccatgaatacttcaattaataagaacactttaactgtacctcctataaatagaacattaagtggcaatagtacctcctcacctggtttccgtattaatggttccaacagtaattccaacagacctttgtccatggtattaagcaatgtgtttaataagtccagcgatgaattactggaatattcatcgtctaatgaaggtgatattacagggcgcacgacaaagactaaaagaagagaatcatggttccaacgatttacaaaataaaatataacttaagaaattacagcaaagaaaataagacaaacaaagaaagaaagagagaaatattactttattgatctctactacgtatatatcagtgttttattctttatattcatatacatatataaaatacaaaatggacatcagaaagaaaactttgtattatatatactactaatttcaaatataacaagagacattttaatactttcttgtaagaaaaaaattgtatgtgaaatctaacttgttttaggagctttcgcaatttgaataatttcttctaaatcttctttctcacgaggccttttcttgtcattattatctacagttgacacactttcgtcaccatctataatgtatacgtcttgatcaatttcaccattctcagcgacagttaaaacttcattttcctcattattgtcttgtggtattttctgttcaattacaggaatatgtaaatctggtaaaacaatcttatcaacattattatttatattaaaatataattcaactggtttttttatcaagtcattatcactatcatcacttaacaaaatgatagttccattgataaatttcaaatcttccaaagtttgatcgtttaaatcatcaaaatcaaaatcaaacaataacctttgatccttaatatccaaaattgaaacatcatcattttcttggtagccgtatttagttttcaataaactaattagatcttttaaggtagtggatgcattcaatttttcagatgtttgtacaaccccacgaacaacttgaacacagactgggcatttacaatttgggggggcaacttgagggttagataggtatctatttgtagtcatattacttgccattgcagtaaaagccatatttaatttagtgacatcatttaatgatgcaaatttatccaataaatttaacacacgtaaggaggtaattgctgataaaccagcaataatggcattagtagtggctatagcaggtataatattcccagcaatttgtttaatgtcaaaaacagatttcataggaatgtggaatatatatgctctaatgttagcagccatagctacaaacatcaaggtgtcttcatcatccttatcaaattcaatatggcttccctccctttccattctttgtgacaattttttagttgcagcaacaaaattttggataatataattgatatcccatactttattcgatgatattttttctttggcatcatgacaattatttttaataattgattcatctagcaataagggtttaactctatttttccatagattttctattagtagaagtttagcaatatcatcaatgaacaatttctgtaaaatatatggaatacggtcaaaatctttatctaaaataattttttgtaaactttttaactcatttgtctcttgtttgattctctttatttctgtttcatcggtagtgccccattctttattttcctcatcatcactcttattatcttcatccgtaaataattgattgaaaaggaaattttttgcccaaacaatacagtgaataggttgagatggagtggaacgaattgtacacactggaaaagtctttggtgtctccttctttgtacaatcaaagcactctgttttttgaggaaagataggttggatatacccgtcaaaaccagcagtcccactttctaacaatggcaaagaaagaaattgagagatcttgttcacataccttctagctgccaagttatctagggcgttaaatattatattaaattgcttaaaccaatgtagtgggaactgagttgtatccattatattaccttgatatggcaccaacttggagttactaaagctttggactgctttcactgcagtagtggatttaggttgtttaatgtcacgttgtctaaataggaattgtctattcaaattggacaaatcaattgtatctaaatcgacaatatggatctcaccaaactccattaggatcaaatctttaagtaattcggatccaatacccccagcaccaaccaacaaacacttggtctgacgaattctagcatatccatcctcaccaataattgttattaaactactttcacgagccatatctgttttaaaaaaaataatgagtcgtaattacagaaatatatcaatcaaactttgtatagactataaataagctcttgtccaaggggtactcaattaccttcctattatttataatagttataagtaccgcgtacaacagtaaaagctttaaaaaaaagaatatttttagatgaaaatgaagtacttcctagtcttcatcttctttcataatattttttttcgaaaaatacatatatcttttgaaatcatgtctccttaaaatagaggcttcaaaagtttcatgaatttaaaaaggtgatcagatctttctgaaataatcgatatcctttactttctggatattctttctggctctctgcctttctctgttattttttggttaacaaatgtatattccgcatattccaacacaaatgccgcacggaagagtcacggaatggagatagaaggagttagagacacaacattttgcaaattggcgtgtactatttaccatgaatagtgagcaaaaagatgcatatttccatgagtaaaccacatatttataaagagttggcccatattgatcaaaccaaatatggtgtcttttctatttttgtttagtttattgtaaggttgtccttcatggcatcatattatctttataagttatatactaagaatttgaaaaaacaagaattctttaccataggaaacaaaaaaaatcataaaaaaaatatttgaatatttaataatgtaaaattattagttatcgttacaattcctttcgtatccaaaagaatgatttatgtttcgctatactgatatggatacttgataacggctaaaattctaatatattctattgagaaatcatatgctattagtactttccctccctttcttttttttttttttcgttcatatacataatttatatatattattattggaatttggagcccccaacgtccatagtaatggcagacattattaagttatagatgctttttttattgtgtactaaatacatgtataaacttattatatagcgtatatagtataaattcttgtatttacttcagggcttcttttaagtttttcatttcttttgaaatctgtgaaaaacatatttggtgaaaaataaaatgtcttcctgatatcatggtatatccgaacaccacataatatatagaaaaactaattaaaaataactcctatggaaatgacagtaataaactctcattttccaacagaaattatcaacacatcatttatatataaagtactatcatcttattatctaaatttgtgtttttgtttgatttttaattgtatgtaatatattgtataagaaaaaaaagaatcagcaataatcgtttaattttcctatatataacgtctttatatatttattattgccctaactattcatttgatagtgtaattcttcaagtcagttctatagtctaaactacgaaattatttgttgtataatagaggagtcatcaccaacaagattacataagattctgacaaatttagaatttacctattgttttaaaaagtcacacatgtattacttatgaccataataattgtaccgtttatcagtagtgcacccaattactataactagggaattggggtgcagttctaatcatggtaattagtaatacacgtgggacttattaaaacaataggtaaattctagattttgccaaaatcttatgtaatctaatgttttattatgcagcatctaatgttgtagcatgtgtatggcttattaagacaataaatatttctaaattcattcaggatcttatggaatcttgatggttataatcatactattccactaacgctgttagtagttgtttgcgtaagtagttcagtggttagaatccctccttcccaaggtgggggcccgggttcgattcccggcttacgcattttttgctgctctaataatccttaggttatgtgtttctgataacagttaatcttgctgaaatctcaataatatttcacttggatagatataaaatgtagactctttctatatctctagatgtaatattcctatatatctatatatctatatccctaatctaagctaacctaatagtatacacttatatactatatatctctacttatttaattcttggttccttgttctttatttttgttcttgttcgttattgttcgtttttagctgctctcttgtacttatgttggttactcctgcttttatcgatgtttgtaaaatttgcaaaaaggaaagtttagaaaaatatcgtcaacccttatttttctaaacaaaaccctaaacagtagtatagggatattacagctgcgaaaattgctgtgaagtgatgttaatatacgaaaagtggttgaaagttaatataaaaagtagctaaactttctctataattgtttttttctacgacctcaggtagttttcctccataaataacaaaaaataatttggtagttttatcaacttttaatcacgtctgaatcataaatatctagttttgtatcgcttaatatctgctaaaatcctatttttctattaattttatcctaaaaacttctatttcaaaacacttaagataaataggttactgttattaacagtatttttatgtatctgctcttattaactaaaagttgtaatgtcttggataattttctatgaaaaaatcgatatatataaacttgttaaaatatatttgtataaaatttagatgatattgataatatggaaactttaataattatttatttatttcagttattctcttaggtattatttagcgattttttaaggaaaaaaccagtgtaactgttggtaaataatattctttgttgtttaataaagaaatgaaatatgttaagatcaatgtaacaattcactttccaatgtgttttgaatcaaatatcactatatgatttatgttaaatttgtcaagtcaatttttacttgccgatatctttatttttattatatattaaacagaaagaagcaaatcatgtgcttgagtgatgttttttttctttatatgtaatattctataaagttaaaatatttatattgattgtttttttatggagatagccgagaatacatttattgaaaataatgctttatgctagcataaaatattattaattagttatgatcattcctcacttttgcctttattttatattgtaaaggagcattatgataataattgaatttatgattcaatttccttttttacactttgtcttaatttctatcgtcatttaaagatatcaatcaatatcccttttacctgagttctatggatttatggaaccaaatgtcattgccagataagataatgctttattgtggacttttttgtgacacattactcctaaagaggggagtatcttcttacttgaatgcatgaatatatatatattttgttttcttgtccataaaatacagtaacatgcgcattagtctgcagtaaatacatctgcaattttggcagataatacttttgtaattcttttgttacctggagcattgcctaatttcatatataatagttgctttgcttctaggtttgatttgcatgatctataagcacatagtaaatgatttaaggtcggatataaggcttgaatggcaactgccttttccaaagatactcccttaacgtacatcaaaatttgaatagttaactcgcctaccgttctcatgtctcttttgcccattatatcttgaaacgtttcaaaagtatgacaacattcgatgttagtaccttgactaaattcaagtttaaatctctgtaaagaagttcgataatcttgctgattctctaatgatttaggaaacaagacaagtaggtcttttttggaatattctcgccttagcactgtatgcaaggcatgaagtttatctacagtttgttcagagctggatgttcgaattatagagaatctatagtatataagtatcgaccaaagtgctgtcttcagtgcttctgacatatttgaaatcgacgaactcattatttcttctattaaataatatttataattgcaaccggagttttctaatctgttcttctgttctataaatctattgtcacgaatactcatcgctaaatcatcaagtctttttctctcaataatggtatttaatatgcataacgttcctgttgttttgtttttggccacccatacaatatcacccaatgatagctgccgtatttcatgtttcatatttttccttgcaaaagcattggaaaaaaactcacgatcattttgagattttatttctctgtagtcaattattgggtaaatctcaaaagtgttactcttccaaatttcatagcttattccttcaaatcgccttcttacaattcgctgactttcactgagtcctgagtctgtagcagcatcaaatgaagtattattgagggtatcattatcaccagtatttggattcttagataagttaatattttgaaatgtggtttcaataaatgatgaatcccttttctctgctgtttctactttatttgattttaataacatactcaaatcagcactaacttccgtatcctcaaaatcaccatttattggattttctgtctcatcatctgtatcaaaaacaagattgtccgccaattttaatgtttttgctaattgcacacccttttcagtcagtgtatatcttctgggcttaccttcttccaataccaattcatgctttttcagagaagagattgatgaccatgctccataaaattcttttgttgaatgatttggtatcatgctaacgctaatgtatttttgccctacttgaatgatatcttcctttgttacacttctacggtatgccttcaactctagtaagcctaacataatcccataaccacctgaccttttcttcggaatatactctttgacctttcttttcttagtctgagtaatattttcatttagttcacgaactgtatcattctgatccacagtatttattctcaaagcagttacttttctctttcgaggtgaacctactagttcacttttgtctggaactggtacatttatttctttgcaatattcttccagtcttttttctaatctattgacaatagtagttccaataccttttacttttttcaagtcctgcggataataaaatatgtcatcagtatcttctaggtttcttttggctttgttgtatgtcaaattaagctgttcttgtcttggtgttaacctttcaatgaattcatccaaccattgtacataaaaacttttcaagttgttaggaaggctcattggattaatcacatagagccagaatatacttatctacttgcatgtttgtatctttatatgatctgaaatttgcgtcattatatatgcagctataaaattatgcttttactcatgttaagtattgtttatctcgtcgaataaagaaaaaaaagactgtactaaaatcagtaaaattacatgaaatctagaagaaaaaaacgattcatttttttttttattctagagtacaacacaaaccaagcctgaaacttctgttcttataatatccaaatgtttatatacattataaatctttcccttattgcatacctgcaagataatagaatgttaaaaatataaccttgctttattagttaaaatatataaatagaatgagagttgaaaattaattatactatataacattagatagaatgacgagatttatactacaaacaaacaatgaagcttgcatagcatttgctaatgaagctattcacaatttgtcgtagtattcttgccaacctggaacttcctccttcataccgtgtctctttctggcttcaacaacaatttcaccagccttggtggttgggtctaatggatcagaacccaaagtggaccagtggtcgaaaaccatttgtgggaaagcttgaccaccagtagcttgtcttaattcaccggtgaaaccgaaggattcgttgactggtaagtaagccttgacagtgaataacggagtacctggtctttgttcctccgaaacaacttgacctctcttcttgtttaagacagagtagataccaccaacagcggattctggacattgaatttcgactaagaagactggttcttgaatctttggttcagctaataagaaaccggcataggtggctcttctcatggttggaataatttgaccaccacctctgtgaatagcatcagcgtgtaaggtaacatctaagatgttaattctaacagatctcatttcttcaccgaaaattggaccttccttggtagcccattggaaagctgcaacaacggaatccttgatttcgtttaagtattgaacagccttggtttggtcaacaactaagtttggaccagtgccatctggaccgaaacaccaaatctttctagcatcggtaacatcccagttgtattcatcagccatgattctagctctggccttgaaatcatctcttgggttaatcttaccttcttcaatagctaaagaaacctcttcgtccattggttcagcctttaagtagattctgttatgtttgtttggagacttggataaagcagtttgagaagattcagattcaacagtttctctgtaagcaacaacaggtggagagattcttaatggaacaccagcgtgatcgttctctaaatcttgtaaacagatttctaagtgtaattcaccagtaccagcaacaatgtgttcaccggattcagacatgtaagtcaaaacacatggatcggacttagataatctctttaaaccttcgactaattttggtaagtcattagcgttcttgacttcaacggcgacttggacaactggagagacagagaatttcatgaccttcatgttgtgagcagtttcagaggtggttaaagtaccggtctttaataagaattgatcgataccgactaaaccgataatgttaccagctggacagtcatcaattggttcgacgaatctacccatcattaaaacaactctttgaatagccttgatgaataagtcatccttcttacctgggacatagtttggaccttggattctaaccttttgaccagacttgacagtaccagcaaaaactctaccgaaagcgtagaatctacccttatcagaggttggaaccatcttggagacgtataacattaagtcagcctttggatcacaagctttgatagccaaacaagcagcatcatcagctggaccttcgtataattgttcagctctgtagttttgagcagtaactggagatggtaagtgcatgacaatcatttctaacaaagcgtcagcagctggtaagaactttctcataacaacctttaataaggccttaccttctaagtccttttcatcagcctttaaggtgatttctaatttttccaataagactgggatttcgtccttcttgaagttcatgatagcagcgaataatctgaagattgggtctaaaacgaacatgttgaaggctctttctaatggcttaccgtcggcatcagtttccttagaagtccacttcttagtctttgggttgaagaaagagtcaccccataatctttccatcatcttgttcttgtcaacaccgaacttcttggcatatctgttggcgaattgtctgatggtaaaagcccaaccgtgcaaaccggaaccgaaggcaacagtacccttggatgggtaaacttgaacatcacctaagactgggtcagcgtaggtagaaacaataacgttaacagattcgacagttctggcgaaggtttgatataaatcttccttggaaacttgtaattctaataaggctctgtcaaccttgttaatgacaacgactggcttaattctttcacctaaagcttgtcttaaaacggtttcagtttggacacaaacaccttcaacggtatcgacgacaactaaagcaccatcggtaactcttaaagcagcagtaacttcagaagagaaatcgacgtgacctggagaatcgattaagttgattaagaaaccgctaccagaggtcttttgcttgatgtccttgacatcttcttctgggatttcagcatataaggaaatagcggtagacttaatagtaatacctctttcttgttcatcctttctggtatccatgaatctggcttcaccagccttggcagcagaaataataccagctctttggactaaagaatcggttaaagtagatttaccatgatcgacgtgggcaataacggacatgttacggacattagtaacttggtccattaaaccacgcatttggtcaacagtgaaagcaaccatcttgaatttattttgttgatttcttaggggggtgtctcggggatctgaaagccaagaagaagaaggtaaataaaaggaaagtttcttctaattagaggaacaagtacacaagaggcacgttttataagtaaataaggaggtaaaacagggatagtaaaatatatataatgtaaacaccacttttattgaaaggaaagaaaaaaattttaaggccttgtgtcaatttgcagattgacaatggagagcaaatgagaaaaaaaaaaatttttttgttaatttttttttttttacttttgaatttttaagacagatctcaagattgccagaaagattaaatttctctagaaggagaactcacagaaatttggtgctaagttctattcagacagcgggagttacaataggatgtttataaggaagtagggattaatttcttgttccacacactacaggctactttgcaagagaagtctaaccatcagttgacacaaaatagaaaaagctctatcttgcgtggggtgaaaccgtcagactattagtagtatatttgtttcacccacgcaaagaatttatgtaagatgaagaaaaaatgggttaccctcaacttaaaaaataaattctattttttttccgtttcaagaaaataagaagccagcgttgtcgtgtcacaatcggcgcacggggaggaggataacaatacacgacaaggagacccttaattttctctttctttctctctctctatatatatatataaacacaaaaagcagatcttccagaagagaaaaaataaaactgtgtttctgcgagaaaaaaatcggctcatataaaatccggttttttcttattttcatagttttgctaaacggagccacaacaatttgattccctaaacgggtaagcggaatcatcgagtcgccaaatttcgaaggattatttcttcaatttctttggcgggacacaaacgcggctgtcacatattcgatgtccttttttgttgctttttttttttctcttgtatttctttattttttctgttttattttgtggagcttttcgttttcctgcggtgtagaggcagtagacatcattcactcttgcattaaggttgtagtaattatttagtgatcctgggaaaaatactaaaattttatacaaaaagcggaggagtcatctttcattttgtattggaaccatgttctccaatatttttgctccttgcaccgccgataaacaatataaaaagcatttcagataagatatctatatttgtttgtttgttttttttattttttttttaattgtatattatatgcgcattgcaatttcaattgcttaagtttttttcttcctcttccaacagtctatgagttcacttaaaaggacttataccttatagctgctttcaagtgtatctcttttaacgtcattattatcacttcttgtcctttgtatttggtatcttaaaacttgatagacagtaaccaaaaagaaaaaatagtaaagagagacagaaagaaagaacaaaaaagtaaaagtaaaagatatagtttgtcctttgaagtcaagtccaaaaagttacgtatatatcatttttagtggaaaaaaataagtattaatagcaatgagttcatctttggaaatagagaaatcacaaggtgtggatgtctctatcagaagtgttggggaggtgttctataataaagactatgttactttaggtgatactacatataaacgttcagatctaatagctgcgttaagaccggagatagatgattccgacgcctatccaactcgtgaaagatctactgttagaaaattagccaatccagtccctcttgggctagcgtccttctccttatcatgtctaacgttatccctggtcaatgcaaatgttcgtggtgtcactaatgtcaaattgttaatcagttgtttcatgtttttcggtggtgctattgaattgtttgcaggtcttttatgtttcgttaccggtgatacttatgctatgacggttttcagttccttcggtggattctggatctcatggggttgtattaatacagatcagttccatagtatatctgcatatggtgatgatacaactatgttaaataatattatcgggtttttccttgcaggctggaccgtattcacatttttgatgttgatgtgtactttaaagagtacctggggactattccttctactgactttcttagatttgactttcttactattatgtatcggttgtttcattgataataataatgttaagatggcaggtggttatttcggtatcctgtccagttgttgtggttggtactccctgtattgttgtgttgttacagaagataattcatatttccatttcaaaccaactatgatgcctaatgctccagttgtttaggtaaaatcaatctatgctgctacaaacttatagcaacaacaatcataacgatcataataatcataataatcataatataaggtcatgatgttgctattgacttattatttgggaggtgaggatgagctagtagaaaagatgtaaaattatataattcttttatagttatttgtttgtattagtacattggtcataactgcatgatgtatttggtcaaattgtatagtattaataagtggttatctcaagtaaatctattaaaatacagatactagttgtgcatatatacatttacaaattatgcagttgttgattcccaattgtatagttcttattaagcttgttttgttgataatcatctatgcttatagtactcacctgcacatgcatacaccttctctttccccataatcagatattagtttaataagtttcccagtaatttattacaaacatatatttaacagttaattagattgcacttgcagcttgggtccggagttttgtttgtcctaaaatgttttattttgacattctctgttacttgtagagggaattataacaaatgagtctctggagttaagcctttttttttccaaaatataaaattaaagaaaaaaaaaaacataaatcaagaccagagtctttttgatacactggaaatgaaattaacacatattaaattatgataatcacttttcctttcttaacaaatgatacactaataacttattaaaattgtcttttttattttatagagtctttttttctttttctttttaagaatgcatacataatatggactgtccaaatatttttctgctcttctctcactcatatataaacttctttttatataaattctctctctctttccctgcatatagatttttttttaaatgcttaatgatcttcttataacgaaaaataaaataaagtgatggaaaaaaaaataaaacataaataggaaattgaaggtaagaatcattattaactagattatttggtgatgcttaatttcaagctcagttactaatttgtgcatacacacacaaatatatacatacatatatgtatatatccacctgcatatatatttaccataatatataaagtgtacctttataaaaaagcttaatgtgatttatgatatgtcaaattcatccaatcaacatgagcaactatcaaactttattgataaccaaattgatatcataaatgattcaacttctccaaataaatcaattcaacatggtatacctgaagaagtattaagactggtaaattcaaggctgcaacttttacgtatgcaaaatgttagtcaaatggcaagagatataattacaaggaatgttatagatatggaatatgaccggaatttagaagaacgaaaggagattattaaaacactttatcatagaaacattctaaaatcaaataatgttataaattcatatggtcttgacccaaatggtaatcctaataatggttattatgacatggactatttgattaataatatctataaactaccagaactagtgaccactgagacagatgctgaaaatcaattaaaagaatacaaaatattaagagaggaattgataaatcattgtcgtgcaattaaaattggtgaagatgaattagataaattaaagttacaatgtagtaaattagatgctttaagatcttccattattgaaactatgggcacagatgatatcaaagaatacattactatatataataaaaaaattactgaagaattagaagaattaatatataatctggaaatcaaacttaaatctgttgatccgaaggataaggaccagataaaaagattacaatccattttaaatgaattaaaataatcgctgctttacataagcttacgcatacgcatatatatatcgacatgaccttaaattatgtagaaaataggtaacacataaaaaaaatcacacattgtcaataattttaaaaattcaaattaattagataataactatagatatacttacttatacaaaatattaaatacaaaaaaatatatatatatgtatgcatatatgtatgtatgtatctatttttcataaagaaaaaaagtgttttctataaaattattaatccttcttaatcgaataaaccgaagcccatgtcatcatcagattcttcagcagcttcttcttccttttcttcttcagcggcggcagcaccagaagcagcaccagcggcggcaccagcagcaacagcagcaccagcagctggaacagaagcaaacttttgagaaccagcagcgatgatttcttctaaagaacccttaccttctaaggaagctaataattcattaattctagcttcgtcaacttcgacaccaacagattcaataaccttcttgatgtcagcagcagctggagattcgttaccaccttgaactaacaataagtaagcagctaagtacttcatttttttctttttttgacggtttcttcaactggttctttataaatgggacttcttagaaactgaaataatcaatttaagcaaaagtgcagactattccttggtttctttcaggacagaagtaaaagaaaacgaaggaatcaaatacgacataaaaactagatttaagagtgtaatacatgtaaacaacacaaggacagaaaggatagtaaggaatttacaagataagttgaaaagagtgcaatctaaaaacgatatgcatccaacagttataaaaatcctttataagaaaatattcaaacaatcgatgggggagaaaaagaagaaaaaaaaaattacatcacatagtaaaacttaaaaagagatattatccatggggataaaaaataatcaaagaaaagaatagaagaaaaaaaattttttttgcgacattccaaagttctagaccgtctgaaatgataaacaccaaatatttacccggataatgtatttagtcacatggcctttttggaaaaaagcatggaattgttttcttttttgaaacccttatcggaattatgcggaatcaaattccgctttgatttctgtattttgttacatctaccatttttttttttggttaactttttattaaagaaaagacttcaattgaaaatattaatgagtcaatcatctgtctctgttttacgccattcagtgtgatacgacaatacaattaagacaattgccacattagattaccttaaagtgtaatagtttctttataaagtactgaataattgtctcattaatgaaattacgaaacttctactgatgtgcatacaacttcatgtgcactctattacatatatacctggtagatagttttgcttaaagcttggaaagaaatatggcatcctaattacaattaacaactagggttttttaggcaggatttttgttacagattaagcagaaaaatttcttgaaacagctgctgtagataatgattttcaccaatctatcaataagttaatttatatgtaggtatctcttgtcaattgtaagatactacacaacacaacacagtaataagcactgtaataattaacagttaagaggctcgatcaaaaaaaaaaaaatttctttttcgggatgcaggccgatcttcagatgtttctcaaggaagtcatgcacatatcctcgattattaaatgatcattcattctgcatagtatggcaagaaaaaaacaaataaataaaaatcaattgagattaatatttggcatgcaaagttcatgtgctgtttagtatcaatatcttcaattttcgtttctcttttctatatttggagtgtggttgatgtgttgagttatcgactacgctgtttttttttcttttttccttttactgatctcaatacttgtaaggcaagtgtcaattactaattatagatattcacagtattgaagtatcacagttaacattgttataaaactagttgttttgcttcttcttacgcaatagtgtattatcttcacactcgttactatttttaaatatatatgtatatatttatcaagttttgaataactcatcgattcatattgtttatttacttgcttattactactattgccatcacatcaattataatcaatctattcctcccctctttgctcacttcaatcttttcagaaacaatcaatggactccaaagatttagtaacaacagcctctactgaacaaacagtaataaataataaaaactctgcgtttaaagatatactgaatgggtctattgcaggtgcatttggaaaatttatagaatatccatttgatacagttaaagtcaggctacaaacacaaggagctaagatgtttccaaccacttggtcctgtataaaatatacataccaacatgaaggtataaccaaaggatttttccaaggaattggatctccgttatttggtgcttctttggagaatgctactttatttgtcgcatacaatcaaacctctaaatttttaaacaagcatactagtgttaacgaattgattaatattattatatccggtgctatctctggttcgtgtgccagtttcgttctgacccctgtggaattaattaaatgtaaactacaagtggctaatttagctaatagtgttccaggtgctgaacaaagaactactaaaattttccctactatatcaaatgtaattaaggagagaagcctgctgggattatggcaaggacaatctggaacatttatcagagaatcatttggtggggttgcatggtttgccacatatgaattaatgaaaagcaagttaaaggaaagacatccggataaagaaaataagacttgggaactattagttagtggtgctagcgcaggtgttgccttcaatgctagcatctttcctgctgatacagtcaaatcgattatgcagattgatcatatttctatgaaaaatgctattagaaaagtaattacaaaatatggagttacaggattctatcgtggtttaggtataacgttgatcagggctgtgcctgcgaatgctactgtattttatacatatgaaaccttatctaaactatgacattaaacaaaatggaactctttcacttttttgttttgttttttttttcctttattttattaattatatttgaggtagaacaatcaattaacatgaacgatttaatgaatatatgagttgacatgatagaaaatgaaaggagatgaccttttattttttttaatacagtcaatctttgtaatccacgcccaagcgtacatcacacaagatccaatatggtacaaccagaacaattgtgaatgattattatatgactataaaacctagctggataatacagacacacatccatatagatatgatgataaattattcatacagtcagctacatggacattgtaatagaattgatttcatttatccaatatagaagaaaagaatctattatactgaactttctgtaactttaagattcaactttcttcttattgtaaataatagtgcatgaaaagtttaaaaaaaaattgggaaattttaaaaaaaaaggagcatccattttactcattcatatacaatataaaaggagttagtagaatatatatatacatatatatgcatacgtgtattgttttatagatatttagttgcaacgttttagtgcagtatttattacaatgtaagctaaccacatgaaatacctttaataatggagacattcaattcttttaggaaagttgggtatgttgacacaattctccccttaatatcatatgtgtctttttcctcctactatttaataatcatttgacttgaaaacaaatagacaaacaaacgtaccaagaatatattttaaattaatttactaacaacaattatattatttattttatccttttatatttaagtttgattgatttattttttgcttttttacgtgcagtaagacagtaggttacgtatttcttggtggtgccctttctatttatattgtaaaatcaataattaagtcaaaaagagacgcaaaatttaaacctcaagcaatgatcgatgactatgaggtcgcattaaatcagagtaaagacaaaatgatagatgattactatgcaaatatagcgcaagttaaacctgggttcccattaccaaaatctgcttcaaataagggtaatagtaatggagaccctaatgttgaaaatgcgcatgcttttcaaaggaaaagtaagtatgaagctggtggtgtgagtgccgtaacgagaaaaagaggtgataaattaggtttttggaacagaagaagtaataatgattaaaatagattgattaatatctttttcgtttatttcaagcttctatttatatttaattttggggtttattgaaataattatctatatatagtttttaaaaggttttagattatataataaaaaaagtatcagcacaaagtgtcgaaaggagtgatattttattacatatctctaaaaatattatgtgagcaatataataaacattagagggtttattgaaatcacatatagagttacatataatgttattattaatatttatttttataatgatataaataattttgaatatcaatcatatatattattattctggaaggggagcggggtttaaaaaataaagaagaaacaacaacaacttttaaacccttatattgcttatgccttcttatcttcaaagtaatcggccatttccttatctaaatcttctagacttttcttagctggcttaggttttctttggtgttgtcttttagctaatacagcttttctgtttggacctctttgtctattgtggacatttctttgtggagcaggttggcttctgactttacctggtaatggtttaattcttttagataaatcttgttgattggcaacagcagtggatgcagcagaagcacttacaataatatttaatctcaatctcgatctcccgttatcaattggtgcgccgttgaatttagcaacagctttttgagccaaatcaccattcttaaatgtaatgttggccataccagtagataaacctctttcattataagataataatactccagtaacaccaccaacatgagtagaaaaaaattcctatatcaaaaattatcactatcaataacaataatatcacaaatattgttaataaaaaatagattgttagtcactatataattcattatgaattaaaaaagattaatacaatagggaagataacaaaatagtttaatattggattttgtcacatattattttcttggttgaaaaaaaaaccttacaaaggtaaaaaagtcacaagaatatcaaaaggataaaaaaaaataaacgtattcaaatattcggtgataaacgatttaagataattatcgatacctgcatttgaatttcacttagcaaaaacgacaagttataattagcattagatcagtagggtttcattaggtgagagaattgtacgtcaaattgttttgaaacatgataacacttaaactaaaaaagtcttatactttaataatcacgtgttttttataattaatatccattcctcccaaaatgaaagaaaacaaacttaattgctccttcataagaatattattacagtaactcaatttcaataatgcataaaaagaactaaaccacattattgttggataaaacgagttcttgtcaaacaatacaaagacgaactaactagggtttatctagttaggatggtgttgttttaaagtacaattctagccacccagtctataatcaatgcaaaaattaataattaagtagaacatgaggttcgctaagctattcaaaatactggaatgcatggcatagtatgaaaagataataaatatatatcctttctcaacgcacaaatatatttaacatttgacttaatcaatcacttaactctctttgcaatttacactgcgatctcctgtcagcaatataattaaaaagagataatatgcatgcctgcggaatttttgaagaaaaaaaaataacattcttttttccgttcttccttccaaaaaaacaataatccaattagaaaaaattattctattcttataccttgatcttatcttccattgtaacttaaatataattttgtttctaaaaatttggaaaagcaaaaaaacatactctaacagcatcttgtttgatatctcttggtaaaccttcaacattaaccttaacatggctgtttgaatttagaagtctagcaactctagaaacagcgttaactggagccctaacacttctttgtgcagctgttctgtttactggagcacggctacgatggacattgacctgctttccagctcttcttggaccgatcttacgacggttctgggatcttttaccgataatttcatctaaagattgatctaagttaccagccattgttgttattatatatgtttagtattaatgagaagggtgtatgaaaagggaggatttttcaaaaatttggttcttttttacttgtcttaaacaccttactcagttggaataaacaaaaatgtttagccttttatctaagtggagttctgaattggagaatcttacctttataaaaacgaaaatgatatttacagaaagaaaaaatttcgtggtttttttgtgttttttagaaaattttgttgtctttttatataaatttttttgtttttttttttttgttgactgttgatgattaaaacaggggcaaaaatttatttttgccgcttaaagaaggaaaataaaataaaatgaaaaacttcgattaaaatgaaacgcataacaatcactacagggtaaatacacatacacataggaacaagcagcctgctctcacctattattcagaactctatggttgtaatgagatggttataaatctattttattatttttgataagatttttttttcttgatacagttaaaagaaaagttgtttcaatgaagttaaaaacgtaagattagaatatagtagaagtgctgtcattgtgtctagttctttaacaatctccgatctaaattaaaagttgtcatcagtatttctgatggtaaaaacttttataaggaaagttgtttaatggtttagaagatgttcgtatgtattcaagagttgaataagaactaaatttacaaaaggatgttaactagtatcaagcaatttaaaatacacaatagtttatgtttttaagcaaatctaagcacataaaaggaacttacgaaaaaaagttgccactctgttgtagtcttaacaagtaaattttatatgctagtataaaattagatagctataatttataagattggttattaaaagaagtaaataaaagtttttttaaaagagaagcagaagtttatacgagagagtggagaaatatcttttatgaatataaatattccgtaaatgaaaagtacttttctatatatggatctaagatttgttgtcacttggaaagaatatattgttcaatctgcacaatcactgatttatgccaacgtgtaagaatgctgtttgtagtatattgggtgaagtggttgaaataaaatatgtttgcgatagttgctgatgtattttaaccatcaataaaacacggttaaaaaaaatgatttatcgatattttataatgtaaaaattaatatctatctttgggaattaattgtacctttcgattctttattaactaggctcaagtatattattagttttgtttttatagattcttgaagaatgactatcatttttataaaatttgtattgttctcttgttttatgaaatatttgtttctgtagcaaaagcatttgcacacatcattgttaatttcataatattctcttaaaaatagaataatgctatctgctgttttattattattattattattatttaaattctaattattgaatagttgcaagctattagtagtttgttcaataataaaattactgaagtcattcatttcattattatatgtctcaatgcaatcttatacttattataaaaaaaacttccatatttttcaaagaatttatttctatcatacatatttttaaattatatatttgaagtatatgctgctattaccttgaggttctattattgaaaatgacaaaatatatatatagtatatattaaaaaaagaaaaagaaaaaacctatcatgtattaaatgcgttgaatatatttaataaaacaaggataggacaaaactagcaaattcaagcagcaggatgatcctccatcgtttccaatttctgtctaacctttgcagctgtcaccatgctctgcaattgctttggatagtccaatacaccaagctgaacttccatcaattctatattgtcacgttcttttttatttttcaactgtttcattttccacgctaatttagatcttgtttcaatcaatgtgcttactgtatattgacaattagtatcaccaaacgcttcaaataattttgtccaattccaagacataatgtcattatatgatcttgtagggccacaaattgcgcgttctacagtataaccgttattattccaaataaataattcaacaggtacttgatatctcaacattgacgtcatttcttgtacagtcatttgtgcagaaccgtcaccttcaaacagaattaatcttggtacataatctgttggaactgtgtcgtctgtgatatggcaccgtggataatcttgcattgcaattccaacaccaaatgcagccggaagagctgtcccaatcgataaataaaacccttgtgcaatatatttaagttgattggggaaaacaagatctcgaaaggcaaagtagattgcgccagtctcagagactacaacatcacctggattaaaaaaagttgaaatagcttttgttaagcgatccacagtaatatcctgctcttcagaatcaacattttctatatctggatagacttcttgactggtatatgcttttactttagaatcatattggaaatttaaaaacactgggtttatttctttaattaattcctctaagataaaaacaaaatttattcctctaattattttttctgtgttagtatcagtttcaataaatctaatatattcaggatgaagttcaatgattctagcgtctttcttgtatttaaaagtgtaatggccatggttgatttcattagcatcaataccaaaatttagaataaggtcacactgcaaaaacctttcaatcacagatggcgcgccttcatcaccgttataaagacccatatagtatgggttaagttcatcgattattgattttccattaacagttgaaaaattccatatttgtgttttcttaatgaacaaatttagttccttattagcctcatatctgtcaacaaggacatctccaataatggctggtgccttactctggtatatccaattacaaattatatcggtaatttcatttagagtagtaacggatggtttatcaagacaatctttcatggaaatagaaggttcattaactaaattattaacagagacaagctgattcaccaaatctacaggaacaaaaatataacctggtttagaatacctatagatatctttaataactttatcgactttgttacaagcagtattgatatcatctaaccattcagtagaacatgaaaccttatctttaaccatttcgtagtaaactttatggttaggacctataaaattagcatcttttaatctaggaactaaatgatgtaaatttttccttgaattagatgtattaggtcttgaatctttttttctggcaacacctacgatatgtaaaattttaacattttctgcaaacgcaccagcaataccatttatagcactcaattcaccaaccccatatgttgtaataacacatccaattttatttgaatagcgtgaaaacccatctgcagaataagctgcattcaattcattacaattaccaatccatcttaatccctgtttaatgagcgatggttcatatagatattctaaaagcggtaaattaaaatccccagggacaccaaaaatcgatttagtacctgcagtaatgatcctttgaaatagatattgtccgaatggaattaattttgttgaatgatcagcgttaaactcatcagtctttgattcttgtatgtttgaaattatttgctgagattttattagcgtcatagtgaataaagttataaatttgcctttaaaatatagtaagatactgtgctagtaattattattagttaatttttgatgttacaattttggattaaacaaaaatatcaaaggatactatattataacactcatcagattggaaaactgtgtaaatcaagctccaattaattttttctacatctattaactgatttagtttttttggtaccttgcagtcaatatatttcactctttatatatgtatgtaattattggggaattcattgacacatattattttaatggaatgaaagttatttgtgtctaaggtattttaatgacaccatttgttggcggaactccgtgttttaccatgtcatgccgaacaaggtcttgccgtgttttcccgtcagtcatcggctatcggcggcttttctcatttttttttcttccgcatgtgcaaatataaaatgttgatatcacacgaaataggaaagagggaggggaggagggtagtagtattatttttatcgttttccattaaatctgattcattgtcaattaaaacgatcaaaataattagttctcggcttcgtgacctttctatagttggtttatttaaggttatctatcaagattaccgactaatcttgaaattcattgattaatcaataacaacaacaaatgatataaataatttaatacaattttgttattttctctcttttactctctatcttcttaaaaatcccctataaactaaacaaataaagatcacaaatatacttatatatacctatatttttaggcagataaaagaagcgtaatgttaaccttttcttttcttgctatagtgtatcatatttagtcttgaattggaataaagtaacactttggaacttttaacttatcataaactcttgctgtgtgttaagatcattgtatattttatttcatctgagattcttgtaaaacaaatatctttttttcattagttgcattatttaattatttcatattatgtttgtttgtttattttcttgattctctccataactaatgtaggaaaaaaaaaaaggggggcggggggagtgtttgatctttaaccttaaagaacttttattatacttcataggatttagtaaatttagtcctagcagttaaacgttacacaacactttcggtttttatatattggtgtaattcatacccaatccagtttgttcttggtgtgtgattatccatcaaaagagtaattggtttaaggagaagataaggaaataaaagaaaaaggagatttaagatatggtaagattatctggattgcaaagagatgttttacactcctatcgccaatgggtacgaatggtatacacgaagcctatagaaaatcgactacattttttaaaatatattcatagtgagtttgataaatatagagatttgaagagaaaagattttactacaatagaatatcttttaagaatgggtaaaagaaaacttcaaatgttatcgcaaccaaatgttaaagacattcactaatattattctctctaatggtaacactcccatcttctctatttattttattcttctttattttatttgaaaaaattgtaaataccattatattatttcttacatgtataatgtttctctatattcattatgtatttattataatctatatatgactcatcgaaattagttatcatcatattggagtaccttcggaaatgataaaatctatatcaatttatgtagtaatgcaaattcaacaatataatttctttctctcatatcctctatatctctttcccctgtgatgtcccgcattaaacttggtgtaaaaaccaatgccaaattatgaagattcattaagttgaatctatggtattgtgaaactaaatttatatgctttattattaaggacaacactcttatgttctcctgtggcaattgtcttagtaacttagtaatcgattccttaacaaattcaaataaattgttatcaatgtccgtttcttcattttgaattaaaggcaatttttcaatcagtttgtcatcctttactaaagatatcaatgggtcatatatttcgaaggaaataatgggatcaggcaatcttctcaaaaatctttttaatacattcgtaacaacatgaacatcatcgcatatcaaattcaaatcactattttccgtatataattttttttccacttcctcaaccaatgataaagacccagattttctataaaggccttcagtttccaaattacgtttatttgtctctataaaatcaatacatttaaagatgatgtctggtacatttaaaacattttgactcttaaggcaatattgatataatgttgaattataataagtgctcatagaatttgaagtatctgaaacacttttgtattctgtagaagtggcagatgttaatgaggctactgtactggttgcaccattattggatatattatttgaaaaattctcgctattagatcttgctctattttgtgaaggagttaggttcactttattagccgataaatgggtagtggtatttaggttttctgtggtgttatgcagtgagttattattaccaaatattttccaaaatttgggtttactgccgtttaaagtggaatgagaatgtatctcttcattgtctgaccctattaaactctttctagtcatatttactccatcgttcaatataccgacattactatgttttgataaatttgtttcttcgtcaaagtattcttgtttggattgttttaatttcctaacttcatcaacaagttcatctctttggcttcttaaactgtcgatttcaatgattaatttctgttttgagacctccatttcctttaattcaagcttcattttcctcaattttatatccatatcttctacactatccgcaaaatttttattttcatcctctgaatcactgtcagtatcttgtgcagatttctgtgacgcagtcttggtaatcttaatatctaaagtgtccttattaattgttgaagttgaggattcttctactgaggtaaagttatccgttttagtaccattcgtcagaataggagtactttcgttgaggttggttgtttgtttcttttcaagtatactactttcagaagaggtaggaatatgtttagaaatagaacttgacaccgactgtggcattcttctgaacattgtttggttatctaaaggtggtgttctaaacattgctacacctgatgttgacctagagtcagtccatatattactattgtttctttgatgttgatttcttggagtggaatagcttgttgaggatatagtggtgtttgtcggttttgtaacattcatgttaaccaataattgggagctgtcatagattaatgtatcactcttacctctactcgaatgtcgaatagaagaagcagggattttattagcaccagttgtgtttttattggccttaatatacatatcattttcatgacttgaatgtacaccccaacccgaatgtgtatcaaaattttcgttgtttatccaggatgatttatgttgttcagcaactttatttggatcatttgtggttacattatggcttttatttttccaatgactaaaaaaattcttagattttaatgataaagatctacctaattttttccctccagaattggtagcactattactgcgagtattaccgacaccatttgtaataaaactattatttatatttttactttttgaaatattagtagaatgaatatatgtgtcgggtgttatcatatttgatccttgttcattcgtactatcaaactgtaatgcaagtccttcattcaacgaagataaactgtttatatgattttcttgagaagtatccataattcttgaagatcttttctctattctttcattttcattgttatgtgacttttttatcacagaattattagattgaaatattgacatagggctatttaagggtaaatctatggtttgattaacattcaaactcctcttgtttatttctggtgtttttggcaatgtattcatattattcttttctgttatatccgagatacttgttttacttcttgcaggactggagtactcatcatcatgtggtatattatgggaaacaggattatttgaggtggcaatactgttatttgagatcgaattggttgatgcagtcaaatatgatctactacttccgatatcttttgatgcaaaatgttcaatttgttgaaagttttttgtatcatttgttatattgtccttgtcattattattttcttcaacatcatctaaagaagaagtatcgttttgtaatgttgcattcaaaacatcatccaaagatatacttctagaatgatttatctttaatccattaacactatttccagatgatgttgatggtaatctagatgtctgttcaaggatattttgttcaaattttgaattcgataatgaccttgaatgcctatgagtagaatagttattaacattattaaaaagataatcattcctgggtctcatacttgaccttttgggcaaaataaaggactctggagtgttctgcttaacagatgtaggtcctctctcttgatattgtatataaattggaagttgttctttatcttgtcgttgttttgattgtttgtctttatataactgtctcttagccaataatattttatgacagttgatacaatacaatccctttcttgtcttcacatattttaaatcttcaattaatttcccacatttataacatttaaaacattcttgacaatatgcctcattggatgatagtatgatagccatatcgttaattggtttaccacaatgctgacaatttctagaacaatcattacatattaaattgcatgatttaatgtcattgatttctatattttgaggtaatgtaataaaatcatcatttttttgtaattttttatgacatcgtgagcaatgaaaacagtcttcatgccatttaaaatcatcaatttcatatattttaccatctgtgatatcaagatgacactgacaacatgtcaacgtagaattttttgattgtttttgaggttctgtcattaattttttagaagtaaaaattttaaatactctatgctaaccaagtctataatagttataatataaagttgtattccttaatttatctatagatatatatatatatatttgaaagaggaaataattttatttaatgaatcagattcctatcaactgaaccttagctattatatttttctatcagcaccactatgaacactaacacaattaagtttatggttacacaatttaataatctaattcaatcaaaatattacctcagtttaagctatatccaaaaatagaaaaagagagcgaaaaagaaaaaaaaagagagaagatagaaagatctttaattttcactctctttgtcagttaattgtcatctctgtagaaattcttgaacatctaaattatttgcctgtccgtaaatcctgttttctattcttttttaattttttgtggactagtagttttttaaaagaaatttatttttagacctatggccacatcttgtttccccgttaggaataatattaccactttagtactatggttactaaaacggaaatgatgagcgaaagaagaaatctttttccaaatcaatcacttttggtttgttttcttagttaaagcaaaaaaacgatgagaaagcagtaaaaagtgaaaagtaaaaaaggattgaaagtgcaatagagttacataccgatgcttcattacccaacaaaataagtacttattggtcaattcaggcaaaaatagcaacaaaagtataagcgacagtgtaggttacgacaacataaaaaaatagaaaaagaaaagaaagagaaaagaaaaaagataataatataagatgtcttccacagattcagctagtgtttctacagaatttttgacaaatattattggaaaaccagtcaatgtgaaattacattctgggatgctttataccggtacattagaatcaattgatgggtttatgaacgtaacattatcatccaccactgaacattatgaaaatagtaataatggacttctccataaatactccagtgatattttcctaagaggaactcaagtgctgtatattagtgaggtataatatttatgcagatgtatataactatatatagagagagtgtgtgtgtgtatatatataaaaagtagtgaatttatagtaatatcataaaaaaactaaatttactaaattgaataaaaataaaataggaatatatatattaaacttttatttgctgtatattaatatttagaattatttaaacacaagagacaggacaactgaaatttattaaaaaaaaaagaaaagaaagaaaaacacaacgaaagtatattgatccttatgctttaaaataataatcatgattattattaatataaaatactttctacgttcatctatttattcaattacaatggtttctcttaatgtttcccatctttgtgatgtcttaaatggaagtaataatctaaagagtaactaaaaaccaaaatagcggcagttaaatgtaaaagaggttgaacactctccttctcgaaatatttagccttataccaattaattagaccggatggattactgttctttggagctggtccttgtggtaatgatttataaaaattgaccatattagacactcttttagcatttggagctttagctacttgattggaagaaacgatctttggtgggattaaagtggttaaggaacgtctaaatagcatgtttctcaacatcattggatatgtgattttcttttttaaaattgaaaagaataaaaattagatattagttttaatattaacaaaataataagtatacacactaaaaagctagacaaatataataatatgtgatctagttttgttgtgaacggtatttatgagatagagcaggtattaatagatatgatccctttagtctgacaccgataagtaaatcccttacttacttatctatactatattctgatattttttttcttggttagcaaatggtattacaagtaggaggaatgtgaagggatatagggaactaaattatgcgaaaccaggaaggaagtaatcacaataaaaaggaatggtgtctattactgatttggacaatttacttattcttccccaatgtttgttttttttgctttggtctcgataaagcaaactaaaaaattgcatggtgaagtaaaaatgcgttttgcgaaacaggaaaaaaaaaataaaaaaaagaaaaaaaaatagaaaagaataagagactaacagagggaaaagggagaagatagaaattgagaaatggaaattttctattttgctcgaaattcattggctgtaaattttattataaagacgacaagtggtcctggacatcttttatagataaaaacttctctcttggctttgaagatagttgaccacgtctatgttcctccttgtctagcgattcccactgagaccaagttatatgggggatggattcaacattcaacttttttggatagtttgtctgaccattgaggttagtggccaagtcctttataacagtatccgctacctcgaaggaatcttgcattgtggatgcaatcacaccttgactacctctccttatccaccctgatgcatacaaaccaggaattatatttccactagaagaaagtacatgtcctttaacattagatatatggtctttttggaaaccaatatccaaggatttgaactcaggtaatggtacgcctttgtaacctagtgaagtgatcaacaaatcaatattatacgtgatcttttcatttaattgtggaaccactctgttttctggagttattatgttatggcacagtgttagtgatttaatgtaaccatttgaatctttatttattcttaatggtgtcttcaaataatccaattcccaggttttagtgactatgtccagtggtttaaacttcttatagttttttttagttctttcattgaatggtttcatatattcatcgcacatttctacccgtctttttaatgtacggtccatattctttatatcgaattgatttttattgaaaaattctttattgatagtacctttgattccatatttttccaactcccacaattctcttaattctttgtttgtgaattttgaatttaaaaaatctcttcttgcaattaattcaatattttttatattacaattctgcaaattttttaatgcaatctttgatatatctgtattattccaaatttcatcaatttggttacttattaatattctcgttagatctaatgcgacattcccattaccgattataccaatatttttcactttggaccatgggaaattattgaatttttcagacagtgaataatcaaaatgtccattgtaccagttcacaaactctctactagtgaaaacgcctttggtagtctgttcaccagggatattcaatctcctgtcactttgacaaccataactaaatataacaatatcttgattatctattatttgtttcagtttaatatgtgaacccccaacagttacgccaccaatgaattcgatactattctgttgttgttgttgttgatcttgtgatgatgtgcaattattataatcatagtcattgaaatgttctttgaagcaaagcttaaaagtttcttcacaatttttaacttctgggtgatccggtgctacaccatatctactcaaaccaaatggtactggtaatttttcccataactttatatgaatgggaatcggagatttttttaataatctataagcagtataaaacccagatgggcctgaaccaatgattgagatcgtcttttttaacatatatcaatgtattgaggatgtctattcaacacagtgtaacatagtacatatacagtaaagtaaagtaaagtaaaataaatgaacatttgagagtatttttttctctttctttcaatttttttcacttattttatcagttaacatgtcaagtttatcatgttgacaaagatttctacatcttacaaattggaaaaataaaatgaaaaaatggaaaaaaaaaaaattttaaagacaatattacaagaagctaagctttgattagcattttacaattcgacgttgttaataaatttcgattttatttattcttttacagtctgttagaaatattcaattggaggtaacaattattggatcattttgaaaaaatataaaagaataaatgcaaaatctaagatagaaagccctttttgttgttatgtttgttttgtttgtttttttaaaatttctcgaaaagaaaagggtatcggaaaaagagaaaagagattgaaacattgcaaaacatttgtttacaaaaatggattgacaccaaattcttttttttttctttgctttttgttcctatcagaaaaagtttatacctaaaaagttttttgccacggaatctgtcattaaaaagcaaagttggttccgtgaagtgtttccgaaggtcttgggcatggtgtatttgcacacagaaagagtagtctgtttgacaacaattttttgaataaaaaaaggtatcaaaaataatatgaatagaattgaaataatattagctaggtttgtgaaaatctaaattcattatattagatactcaaaaaaagaatctatattgaagaagactcgaatataaaatgagttatacaatgtaacccattgtataatattgtatctcgtatattaggtatctaaaatataagagccaagcaaaataagataaatttatgggtaccgctaataccttacaataataagttaagaatttacattattattattatcaatatcttcttataagtttatattatttcattctattaaattttttttttttaagaatatttttaacaaaaacatttatcatattgaggctctctgttaacaaaataactgaaaatatcaactatcgaatatacatttatctatttgaataatttgttgtaagccattgtttattttactagatggttttttttcagtttgaaaagtacattttatatttagttttggcaatttcaatttaaaataaacaaaaagtaatttaaaataaaaggattctaacttcaataacttagatcaagaaatgatattaaatattgcgacttatccttttagatgttcttcgaaacacttgagtcaactttgttttattattattattactacataacgtgtaataatgactcacactgtctttttcttgctttccatgatagaaagttgtagattgctagatatacacacacacacacacatatatatatatatatatatgacaaccctaacatagaagtagacctttatatttgaactctctgataatatatcgaatcttatgtctttttttctgctacgaaaccctaaagaggtataataactagataaatgaaagatagatagggatattctatttttttggtttctttgtgaatttaaaataaggaacagctgttagtatgtgtgtgtttgtgtgtgtatgtatgcgggtggttgtggtgggaaggggaaggaaattttttaaagcagaggttttctctcggcggctacttctctttttctcttctttttttttttatttcttgtttgggtaaactattaatggggtttttcccctaacaccagagacaacggtgagacaatacattcctcttatcagccccacccctattgttatcctcgctactattgttactgccgattctattgtagctgctattatcccacaacagcaacaccaaacagaaacaaaaacagaaacaagtacaataacagcaaacacaatagcaatcgtggtatttattcaacaaatattcaaaaaagaataagaacttctcccctaaggaaaattaaaagagtctatgaaatttgagaaaaaggctaccggaaagaggaagatagatagaacttgaaacgaaacgggaagacaaacattctatggaagcaatataaagaatatgttatatgaaggttgtttgtagatagaatccatttaaaggtattccaatactactcttccctcctttcgcattcacactcttctttcattcccctcccccctcccttgttgttgaatctagatctctgatgagaacaacatagataacacttgtcacttgtcatttcccaacaaagtaatagtttataaatattgtcaaacaactatatatatatatgtttagttatttattttttaagatacaagaataatattgatacaagaagcacaaaaaataaacactagttttgacatttttctaagagttaaaaggtaattaaagttgatctctttctctctctttctctctcaatatagatatatttatatatacatacaatatatatgaaaacgtaaagcaaaaacaaataaacaatactatgaacactagttttatttctaataattcacaattttctccaaagataataccatgcaataggactattgaagattcattgaaggatttggaaacttttgttgtatcttcaaccactacaatcaatacagaaaatcaaacacatcttttattaaacaaccataacaatcctatcaacgattataacaacaacactttacatgacaatttaaatagtaataatactatagattgttcaaaaaattattatttttataatacttgctcaaatggtattaagcaactccaggtaaattatataaatgataacagaaactctattccacgaactatgccaaatttagactacatactatcacaaccaacaactacaacaaaaaaaaagttaaatgaaaataaagatcctaccattaattgtggtgatttacaaaactccctttctctctcttcttctcaaagaatttatccgacaactttaaatcttaatatgactaataacaataaccacaataacatgaaaatccataataattataaatccataaaaagttcagctataattcctacatggatcaacatacccgtaaattctaaattttttattattaaatcaaatagtttggaacacgttaaaaaatcgttttacaacagcatctggtcttcaacacatttcggtaacaaacggctgtctgaatcatttaaaaacttagacactaataaatactctaaattatttttattcttttctgttaacggttctggaaagttttgtggtgttgctgaaatgatatctgatttaagagatgatctagatactagcatttggtcaaataacgggaaatttggtttagcatttaaagtacgatgggtaattgtcagagatattcacaataaatatttgaaaagatttttactaccaaataacgaaatgaaacctgtgacaaattcaagagacacacaagaaataccatatttaattggtgcaggaatcttaaaactatttaaatcacagaatccagatatcgaagtcacatcttttttagacagtgattattagattcaattgaacttattctaattatatattctttatcatacttccataactgttactagtagatttatttaaacattgctacatcacacagtatacccaatttatattcataatctttctaggcacatttatatcgtcatatacctgaaaattaaataaaaaataatatacaacccacactatattaacccatcgtataaatttaatgcaccaactatggtaggatcaactttagatccatctttaaattcgtctagtgtaatatatccatctttgtccctatccataagtctaaatattttatcaacacgtaattcaggcgtagcttcatcatcatctaatttcaccatggatcccatcatcttataaacactgcttacaatggtcaacatttcatcatatgttatatacccatcattatttatatcatacagtctaaatgcccagcttagtttttcttctaatgtacccctggaagtagtacttaaaacagtaataaattctttaaattcaatgaatccattattgtcgtgatcaaatactgtaaataaatggttagcaaaatcttctggcgaaccaaatggaaaaaattgttgatatattttgacaaaatcttcccttgttaaatatccattcggacaatctcttaagaaacctttatgccactgttgaatctctcttctatcaaagtatgtcgactgttttagactagtcagatcatctttcgaaagttttgacgttttagcccccataataataattttttctatttaaattctttttgttgaatagcccagtttctttccaatagcgttaagattcagtgagtcaaataaataatatattattagtgtaaactttatgacacttactcttagcctcgtttcttttctattacccctatataataacaattttttattcttctgtttcaactttgctttaatacttatttgtttaaatcatttaaatttaattttgaaaaaaaaaaaaaagaaggtcagtttcctaaatatatgaaaacagccatatggatcaaatacaacaatagacaaccgtatgcatatgtagagatgtacatgtacatgagctgataataggttattgtaatcatggtttaaaaaaattaaatgaacaccggaactacattattattgtatgtaaaagtatacatgattatataaaatttatatagaaaaaagccatagtgtatatgcgtgaggaaggaggaagggaaatcatcaatacttatacatttgagagtagttctgttaaaaatccattcttcccatatctttcaatataataaacttgcacctttttgtccatatatatattatgttgagttctattcactttctttattctcttaacatacgtattcacaagggaacgactggtatcgtcccaagtatttccacatgattcccaccaaaatgtacctgctaatccattagacataatatattcacttttaactagagtagaatttacgttatcatagccaactaatattttattcttcacatccacacaatatgcggccacatggtcaggatcaaacatttctttgctattaggaattggtagttgattgtataaccagattcctgattctccctcagattcaccaccgacacctttaaattttttcttcaagaatgtatttggatcatttaataatagtgatgaagaaactggtttaggtaatgacacttgagtaaacccacgaccatacatagccatacccagaactaattttgaagacagaatgttatattgttttctcatatatgctatggccgaatctgcatttaacgatgtttcatcattggatttagaatcatgcttatattgcacctgtaagccaatccttttttgtctcataccattataaaggttacaatgaagacctgtatattctgaccattccccataatagtcatatgtcatcatattccaaaaatttatgtatggattcattttattgactagtaaaatcttcaatttctcttcaaatgctggagttgccacagaaagatgaaatctattacatgcatgaccccaaattgatctttctaactcatttaatccggatctcaatctttccacaatttcgagatactttttaggttcaactccatcatccttaggaaattcccaatccaaatcgatcccatcaaatccatgtttaaacatagtatcaatacatgattcaataaattggtccattttcttttgacttctaaccattttggggaataattctctattcgaccaaccacctaccgacatgattgtcttaaacccctcattgtttctccgaaaataatccatcttcaaccaaaataattcaccgatacaaccaagtaatttaattttaccatacctgtcactgttaatattcctaattggttctatagtcatttcaaaatcagaccaagtgtcactagatttaatacgtccagtttttgaatctattacgaaaaatgcatagaacacatgggatatttgattgaagttaatatcatgagggaagtgagaacgtggtttatacggagaccagtttgaatagtaaacacccgaaatataaccttctttatttatgtctctatcttcaactggaacaaatggtaaatctgttttaacttgtgacttattattgttgacccttttcttaaagaaacacattaataatatgtaaaacaacgagaaatgattccactttttagtagctttcaaagaaaagaaatgtagattagagtttcttaaagtttaatcaaggagtatttttttctcattcaactcactatccacatacacttctttttgtaaagaggatgtgtgtcttatataaggttattttaaattaattattagcaaagtaatctaatttaacgttaccatagcattaaacatagcaatagaaataaaaagagtaatcataaagaatatataaatatattctattaaatgaagttagtaaaatatgtacgcatacacaaatacatatgtatatatataattcgttgattatcatggagatatacagttaattatccttattaatgatggttttagtccttaccatttcaattcttcgccttacgaacggcacaaccaaattgataaagaataatattatctaagtcccaaataccgttcttagcaaaaacatcattgtgaatcaactgcaaagcctcttcctttgtatcagccacaatttgtagatgagaacctgcaaaagtacgttctccacctggagtggttggttcattataaatagcaccagcacaaactaatttaccttgttctactaaaggtggaataccagctaaatgttctggtctacagatggatctgtcagaacctggcttatcgtaaactatagcaacccattcaaccattgtgtatttatttctcttttgatacttgtatgtatgtcaatctattaacctattacaatatatttatactgaataatacatagaatcaattgaaccataacacactttaaatcttccagttattttttttaaccaaatttattctcttttacttaccttttgaaggaaagaagaataaatcacattacaagaaaaaaaatatctataaaagaaaagacaataaaaagaactaagatcagtaaagaatatgcatcaatgttacgcattcacctgctccagtatatctaatataaaaccatcatacggaacaaatgaatagcattgctttataccataaatgcatatgaggtttcgttggaacaagcaatgaagaacaaagaaattgaagacacaataaaccaactttccgatttgaaattgggttttgaaaagagtagaccaatctctatatccttccacaaattcaagaatattcggcctgactggaatatcttccctgagaagttagaaccattctttcaagacagtaaaaacgtggcttcatattctaatggtaatttatccataggtgaagaaaacttaagcaaatcagaaatcccagtattaaatgatgacatcgcacaattagccaaaaaacaatctatatcagattgtaaagtgctaatcaaaccttacataggatatgatttatttaaaccgttcaatggaaccatcccattaatgtctgaagatttattgaataccccattaccttgttttgaatatatgatggattgggagaccacacatagtcatgataataaacaatatggccaaaattataaatatgtgattatatctgcaagacatcatattatcgatatggcgatgactttgttcgattacaacaaacctcgacaccataaatggaattgtgttcttttaaagggaaaatacattgtcatatcaatggacataagtactaatagaaaaacaaatatgatagatccttctaaaatgtctctaatggatcaaaaaagatctaattctggatttgaatttgaaaatttgcttactggagtaaaaaagaatagcaatgtttccaatgatgacggcaatattggcaatactataattccatcatatactttttctatagtagaaaacaaattagatgaagacattctacttttactaagaagtgaaatggatgcatataacaatataaccaaatcttattctgaattgaaatgttacggtccattatctatgggaaatgtgcatcatagacataagttattgaaaacttggatacagactcaattagtgccagactgtgatgtgattattggaacaagagataattatagtggattgttaattgatattaaccgatatagtagaaaagaattctatcaaaaattgaataatcgaaattcaactttaagtcgtaaatacaatttaaatgtagctaaagaatggactaaacattgtgttagatcaattgttaaattaattgatatgagtataactaaagagaaatttgaagatattgtatcatcagcacaaccatttcaactgatcatagataataaacgaaatattgcaataaagagattacaacgaatcccaccaaacttgcatatcccaaaaaaatatctataagaatcacatataatgggtaatcttgtaattgaacatatatagaacctacatatatacattcatcaaaatttgtaaatgcataacatattgctattattattagataccctttcaacagtcttaattctcttttctccttgtctcatgtatcaaccctcttcttatattctcatgtattgataccctttgactggtatatttcctataaattaacactgtcttagagaataccatcttagaatatatttgacttcaccaaaatgataacctttcttcgtttgagaaatgccaatcgtcggttttttatttctagatctattttttttattttgaatttcaattgattgcattactagaaatgaagttttattatcactaaacaatattctataagacaatacttcgaaatatcataggatcaaacgacaatgtctaatgattgaagttaagatgagctcagtataaagtatacactggcctttattctttttaattctctatatacacaacaatgtggataatagaataccaatacaaagcgcatgatgggtctactgttcatgttgctaaagcaatgaaagatagtcaaccagtgtctattggacgttcaaatcaaaatacattacacattaaaaatgatcggagtatatcacgtaagcatgtacaatttgaatggataagatcaaataaaatgtttactgttaacaattttggcaaagctaccatataccaagataaatatttaaaagtaggagaaattatatcctttaatgtagcagatattcaatttccattgatattacaattaggcactgcacccatacaagtcttaattaaaaaaatgtctttaaacataatcacatctagtgaatcaagattaaaattacatagtgatcaatttaaattatatgatattggtattaatacaatattagatttccattatgaatctaacacaaggtcttttatgattcaagatgaaaccatcagctccttagcaaaattatctgcgctaatagttaaaattccacttgtttcaaaagaatttatctttgagttattgaacgagctaaaaaaagagcttgctgattttaacacattattagcccatttattagagcgaaccagaatatttcaaaaaaatctcatcgattcaattagagatattactataatttatttaaataaagaacataattatgaaaaggaattactagacaaattaatcgaatgcgttaaagagttccaaggatcaattaaaatttttgaagataatgaaaaatttgaaagttatttgcaattaagaaattcattaaaaaatataataattttaaaacatccacaaagaataataaacaacaaaattctaactatattaggtaatataagtgaagcaaagatttatacagctgatgaatttataaatgacttaaaaataaggacatttgaagaattatgtataaaaaatttagaattaaatcatgatatcaaatcccattcagttgatcatagggttaataatgaatataattcaatcgagactgttcaagatgaaacgaacaataatctggcggctaaaaaatatactagatccttagaagaacctgctgaaccgagccctgtacccgtaaagaaaaaaagactgattagaagaaagattcaagcattaaacccattagatttttttgtcggtgggtcacaatcaagtcaaattactaagttaacaaaccataagtccaaaaacgaaggaaaatcgaagagtacaaagaatgatacacaaactagtaaaattatcaaagataagttctcacaagcaataaataaccctatatctgagaaggatgaaggtgagatccgagaggccaatcgatcgaaaagtataaaaaatataattaatgatatttcacatacaaatagtgaatcaaaattaatagataaaaaatcacccacaaaaatagagacatatgatcaagatactaattctaacgagaaaataacaaaagaaagtaatctaaataatgatcttttaagaaaaaattttgtaaaacaaagtactgatattaaagaaatgtctgatagaattatcacaagtcctatcaattatagttttgaaaatacagttttgaataatatatcagagataacaaataatttaagtgtcttggaaaatcaacctaaaaaacgcaagcttttaggaacaaaagatctgaaagagaaggagaacgaagaaaaagaagatgtgcaaaagaagataaaagtcaaggatggtcaggaatcaataagcaaacccaatattactcttgtaaaaactatccagtctgcaaagactaaggaaatcactaaatatcgcaataatatggttcaaatagaaccggacgaattaacagaggaagccatcaacaagttttcaaatatggctcttattgaggccaattcaaatttagtgaaagctggcaaactgccaaaagagatgaggctagaaaaaggtgaatatgcagggcgtaaaaatttcaaaaaatttgttaaaaggtggccttgtggatcactgagtggtgacgattcattaactaacagtgttaatatgttaacaagacaatttgttgagactagaccatattctatagttgaccgatatccgcaaaaagactcaagcaatgtaggagaaatgctaaatgaaaggtttgcatctaccaataatgaatctttccataaaaagaataataacgagagaaatagtgatggttttgaaaatgaatatttgtcattagagataaataaagataacaataacatcaataataatagttataacaatgtctatggtgataacaatatgaatattggattgtttgtcaatgagagtgaagatgaagatatttggatagaaccaaaatccaaggtatataatagaagtaataacatgcccaatgtaacttattctttaaatgatcaagaaacaaattctggtattaacatgcccccatcaaacaaaaaggtacaatcaaatactcttaaagatgatagtgatgacagtgatgagggccctcgatttcaatttaaaagtaggaaaaaaaagtaagaagaataataacggcaaaaacaaaaagattcaagaaaaaaaaagacaatgtaccgacaaattatttttgcagtcaattatatatagaagttatatacagacatacgtataactattatattgaataacctgaataaagcgtatttatacgaaacaaacaaatggagaccagtctatgttacagactcttaattcacccttttctttagacaaattagagatcttattaaaatcgtcttcaggtaaaacaaaagtctgcaaattggattcaattctatcagcatggatagatttaggcaaaacgatgtaacctctttgtacatgccaactgatcacgacttgagcaggagtaacatttagttttttagcaatgtccaagatcaaaggttcagataagattggtgcgtccattgaacctagtggggagtaagcttcgatttgaatattcttttctttacaccattgaatcaactcagtctgtggtaatcttggatgtaattcgatttggttaacggcaggaacaactttaaagtttggagaggccatcaactcctttaaattattaattgagaaattcgagacaccgatatttctagccttgtcctttggtaacaattgcattaattcccaagtcttgctaaaattccaagaatctataatgacatcacgtttaccgtttggcagttgagggatacatagaagattgccatccttaatgctattttggcctaaacaaacaggccagtgcatcaaataaagatcaacataatccagacccaatctttctaaagattcattcagagccttttctggttcttggtgttgtgtgccccacaactttgtggtaacaaagatttcttcacgtgggataccagagtctctgatagctttacccacttggtcttcatttaaatatatggcagcagtatcaatgtgtctatatcctgcttttaaagcagcaaggactgcgttgtaaccatctttttcaccagtggatctccaagtaccaagaccaatttggggaataacagcaccagaatttagttgcacagtattgttgtttttagttaattgaatagacattgtttattgttatgtatggtcactttatagattaaaagaattgaatcgatttttttttattctttggtgttattataagtaacgtatagaaaagagaaggagacaagaaaaaaaaagaacaagaaaaaaaaaaagaacagttaatggatacgagagtgattttgtttcgaagataattctatttactctttgttaaatcgtatatatatataaatatatacaaaataggtgaataaggaaaatgctaaacaaaatgaacctatcttcaaaatatttaaacttgaaaagggaagggagtggaaaattcacttattttcttgtttttgtttccttgtttatttatctataatgatattcaatatattgctattgttgtgcctagctttttttctcttttttttcgaggataaaagactttccaaaataataaaaaaaaaaacaaaaagaacaatttgacacatgagatcatatgaccgattcccaaatactcgagaaacgatgaaattacattgtttgatcaaagagaaagtttgaaatattattgttattgtatttatttgttatttcttgtttctttctggttttgttattcatgtggttttcaaataccctaaaataacaaggagaaaaaaagaacaaaacgcaggaatgaaccgcacagccctcccttttcagaaaacaaaaaaaaaaagaaaacacacacaattgaaacattttaaggcaaacgggaaacaaaagaaaaattaggggatactgctggctgaggcaactttaacaaattttgttttttttatttttttttttgttttcaagaggcattagatataataaaaaaataaaagaagcaaaatttacactgacgatggcattctgataccatgtgaagatggaagatgaaatagcgtttatttttagtagacagattctcctgtcattaacaaaccagtaatactttttatgttacaatattagaactgtattgcaatatgtacttacatacatacacacatacacacatacgtatatatatatatatatttatgtgtttctgatatcagtagttcctgttcaaatctccataatatttcacttaaatagatataagatgcagatatatatatctgcatgtatctgtgtgtgtgtgtgtattaatatttattgttgcaactacatcaggaaacgacgacaccagtgatatgagatacgttgactcttaatccaaaatcttattataatattcttatttttcaaatcttgtgcaatatcatcctgatcaaccaaaaatttggggtttctaagcaattcttgtacaaatgatgccaagacacaattatagtacaatctgaataaaatgctcaccatagtgatcataatcgtaatcgcatattcgtattgcgcacttgcaccttggctggcttgggactcacctcttttattcaacaagttaataatgttaacatccatattgctattattatctgtattgaaccagctcgacgtgaaccataacgtgaaaattaatgttattatactatcaaatgtaaatgtaacaaaaatttgtgaaaatgtgtaaagttgcggtttatggatttgatacaacccttgtgaatagataatcaatgttatcacacaccaaagataacttatccactgcatcaaatctaatggatgtccggtaaatagtgcaaggataccaaatataccactgcatttgtttaatattgtaatccccaatataatctcgataccaatatataaaggtaatacaccaaaaaaggtctatatatatatatatatttgtttataaatttaccgtattagtaacaataaccagatctaaagtcatatatacatgtacatatatacatatatatataaccttgagattcatcagactgttagtaatctatattatgtttcttgtcacttaaataataatagtagtagttttctttttttttttttattttttttcttttcacatacttttggtaagtttgatctttctctaaccattatagttaatctgtctattaacttttggtgaaatcaatgtttcctgttcacacttttatgttgcaaagttatacttatgcatataaaaacatatagagactagtttaagtatctctatattcttttttttttttttctgttttctattccttgcaaaatttcactttttattataaaacaaatcagaaaaataaagtaaaaaaaatttttttatttgattcttttctatatgtatttctatggtcatctctctttaaataacatgccaaaaaaaaaaatgaatcaatatcacataatatctttcaacaatcatatcgtaaaagccagaagaaaggaggaggacgaaaaaaaaacacatagatcattttaaataatgtctttaaatgagaaatttgaaaatttaaaagtatcttctgctgataaagatggaagagaacatatcaacacacaaatcctggataaatattcacatagaattaaaacagatgaactatcattcaaaataaataaaacaaataaggacaaagctaatcgtgctaccgtagaaaatgtactggatccacgtacaatgagatttcttagagcattggtgaaccgtggtatcatatccgattttaatggttgtctttctacgggcaaagaagctaacgtataccacgcttttgctggtgatggtactccaaagggatccaataatattaagatagaggatattatcgacaagttagaacaacaaccttcattaaaaaatgaaaaattagaagagaaagaatatgcaatcaaaatcttcaagacttcaattttagtgtttaaagatcgtgaaagatacgttgatggtgaatatcggttcagaaattctagatcacaacataatccaagaaaaatgatcaagatatgggcagaaaaggaattcaggaatttgaaaagaatctataatagtgatgtgattccagttccacgcccaattgaagtgaaaaacaatgttcttgtcatggaatttttgaaccgtggtgatggatttgcatctccaagactcagagactaccaatttcaagataaagatgagatatctaattattattatatcctagtctcctacatgagattattatatcaggtgtgtggattagtacacgcagatttatctgaatataatacattggtacataacaataaactgtatgttatcgacgtatcgcagtctgtacaacctgaacatccgatgagtttagatttcttaagaatggatatcaaaaatgttaattcatatttttataaaatgggtgtggagatcttccccgaaagaattattttccaatttgttatatctgagaaactagataaatttaatggcgattatcatagttacaatgatttaaaagattatgttaaggaaaatttgccaattaagaagaccgaagaagatgaagctgaagatgaaatattcagatctttatatctagtgagaaatttgaatgggctggaagaaagggattttgatagattcagtgaggggaaatttgatcttttaaagagtttgttggctcatgataataaaaagaatttcactgctgtaaaacaaatgcaaaatgaagattctgtttatgctgttaatgactcaacctcaggttctgataattacgaatctgaggaagaggatagtgaacttgatgaggaaggagaagaagaagaagactatattgataacgatgatgatgatgatgaaaaggaaaagccattaaaggggaagaaatatgaagataaagaatcaaagaaacaaagaaagcaagaggctaaagaggctaaaagagaaaaaagaaagacaaaagttaagaagcatatcaagaaaaaattgattaagaaaactaaatcaaagaaataaaattaattcagagcacataaatgcatatatatgtttatatattgacgtatatattaactgattctaccacttattctttataataccatataaacgatattgtgacatatcccacctctatataacaatggtgtatatcctatttcatagccctagattaggattttgtccctttgtcgagtctctttggaaaaacaaaaaaataaagaaaaaaagcttgaaaacaaaaaaaaattttttctgcgacaattcaaattcatctcatctcatctcattttatttcctcttagttccacaaaacttcgtagattcaaatgacttgctggttttaaacctagtatttatcatcgctcgattacatatgttctactattcaatctaatattttgaaacatacaattatattcataattatagacttaaaaaaactggttaggttcatcaaaacagaagaaagatgtctgaaaacaatcgaacaaatgatccaagatttgctaagttttacagtgatccaaaattcagaaatactaaacagaaagatgtaaaagttaaattagataacagatttagcaaaagagatttagaggttaaaagaagagctaaagttgataagtatggtagaaagattaatgaatcttattctaatgaaaaggatttaaaagattttgataaatattttgaaaaagaggaagaatcaacagatgaatcttctgaagataaaaacagagacaaagaggaacatagtgatgatgatgatgagaagaaaagggaagcagaagaagaagtagaatcaccaaagaaaatagtcgatagagctcgtggggaagtcccttctgattatgtcagttcttctgatgaatatacttcctcagattcagagtcttctgaaagcgaaatggatagtgatgaagaaggctatttttcttcagaaattgaaaaccaatcacaaccagaaacaggtgatccttcaaagacgttagctgttgtaaacttagattgggatcatgtcaaatcctctgacttaatgatcactttctcaagttttattccaaatggtggtaagattgaaaagatttgcatttatcctagtgaatttggtaaggaaagaatgaaacgtgaagaagtggagggtccaccaagagaattatttcaaaagaaaaaatcaaaacacaaatctaatcaaaatgttgaagaagaagaggatgtctctgatgtcgatattaatgatctttatgaagaaggtgatgccgaaaaagatgtagatactaaagcattacgtcaatatcaattggaaagattaagatattattatgcaattgtctattgcaacaatattgaaacagctaaatccatttatgacaattgcgattccactgaatatgaatccactgccaatatgattgatattagatatgttccagaaggtatggaatttcatgatgagccaagagaccaatgtgattctataccaaagaattataaaccattgaatttcagcaccgatgcattacaacattcaaatgtcaaattaacgtgggatgagactcctgcggatagaatagaaattgcaaagagggccttttcacaaaaagagatagatgacatggattttaaagcataccttgcttctgacagtgaagatgaagaagataccatcaatgaaacttctaagaataaattaaaagcattagtaggtaattcttttacatctaacgtttttggtaataatggaagtaaattttcgactgaagatggtgataatgatgaagacaatgaagacgatgaaggtgttgatatggagattacattcactcctggattggacggagatgccaatgaaaacaatgggtctaagagtaatagtgatgaggaacaggaagaaagtacaatagataaaataaaacgtaaacaaaaagaacgtcgtaaagctagaaaggagagagttaaacaattgaaacaagctgcagaacaagaaaagaaggcaaaattaaaatcgctaagagataaaaagaataaaaaagttgaggataaattggattctaaatctaaagcagaattagaattattaatgatggatgaagatgaaaataacacaggcagcactattaataaaaaagcacatttcaatatgaatgacattctcaaatcagaaaaggaaaagaaaaagaaatcaaaatatcaaaagaaagatagaattgtggaagatgagtttaaaccaaaccttgaagatgatagatttaaggaaatttttgaagatcatgactttgctatagatccttcccaaccagattttaaagaaacttccacaatgaagaccattttagaagaacgtagtaaacgtagtagaaataaaaagaataataagaaaagatcaaatccaataatatctagtgaatcaaacaacaaatcagatattgctaatattgtttctaagttaaaaaaacaaaagaagtgaatctggtataatataaagatatttattttacttcggcatgttatataggtgtaaaacgtcaaaggaagtaggattttctgtatatttataatcaaaactagattttagtcactacaatgtgttaacatattttgtttatatcaggaattcttatcaaaatgatatccttttttatgaaattccaccattataaatataagtatatatattatatacaatcgcatatcattatttattgacaaattttgaatctatatagcttaaccaagagaaatcttgaatgatcgatatattctaagagtctgtactattacaactactattactaatatttttaggactaatttagataattatagtattgtttaattttctttaattttttttgtctcattcattaccatcttattctcactacatatgtataaaaattgttaggaaaagattgcactttttttatctatacaacagagcttatacacaacgtaacgatacaacatctaatgaaaagactacacattgaatagagtaatgaatttagtgcgtgattatatctcggaatctgatactgaatcagatttagataaacatcttgtggaagacaaagtggcaaacaggaacaatggctcattaaaaagaattaaaaagattacaaaagcagattcgaaaagaagaaaactacaaaggaagggtaaagggccgtgggggtcatggtcaagcagtgatgaggattcaagtgaagatgtagagggaagtataaatgattataataatgcatcgcaatataattcaagagatattgcaggcttacaattgatgaataccagtgaatatgatgataacgacaaatcagaaaatgcttatgtgagtctatcagagggagaaaaagaaacgtccactctttatgatacagattattcgcataatggtaagaaaaaacaaccatttttatccccactaaaggatattgaagtagatttatataaaccatcaaagtcattcaaatgttatttacctaagagaataatatatacatttaagggacattacgatggatgcaatacattagaattcttacctcaaaccgggcatttatttctatcaggtgggaatgataatattattaaattatggaatttttatggagacaggaaatgtgtccaagattatctagggcattcaaatgcaatcaaagctttaaaattcattaacgatggctctaaatttcttagttcatcatttgatcgaaatgttaaaatatgggatactgagactagcaaagtaacaaaaaaactaaaatttcaaagtttaccaaattcaatcgattcaagacccatgggtaacggtgatgaatttattgttggattgtctaattcaaagattatgcattatgatctacgtgttagagaaaaagatgggctagtgcaacaatacgatcatcatttagcagggatattagcactgcgttattttcctgatggatctaaatttatatcttcatccgaagataaaacagtacgtatatgggataatcaaatcaatatacccatcaagcaaattagtgataccactcaacattctatgccctttattaatatacatccttcagaaagatacttttgtgctcaaagtatggataattcaatctacagttattcgatgaaacctaaatataaacgtcattcaaataaagtttttagaggacaaaaatcatcagggtttggcattggactaacattttcacctgatggtcattatatttgttctggagatatcagaagtagaatattagtatgggattggaccaccacaaaattgttaaagacaatatctattcctgggaaaaagacaatcacacaagtttcatggcacccacaagagaccagtaagatattatgtgcaggaataagtggtgaaatatatatgctagattaaagtaacaaagagattatatatgtgtgtgatatagataataaaagattaatttattatgatataatattgacaaaaattataatacgattgcgtttattgttatttttactatttttatatatataaacacacgtatatatatatttatgcatagaatgaaacagattttgattttcttgcttgaacttcccctatagcttccacaaaatcttcatgcttcactgatgattggccatttcttaaagcaatcataccagcttccacagtgacagctttcaactgggcaccattgaattcatcagtagatcttgccagctcttgccagtttatatcttcatctgtagtcatcttcctagagtggatttgcaaaatttgtgctcttgaatcctctgttggtaatggaaattcaatttttctgtccaatctacctgatcttaataaggcaggatccaagacatcaactctatttgtagctgcaagaaccttgactctatcatctgaactgaacccatccaattgatttaataattctaacatagttctttgaacctccctatcaccagatttttctgaatcaaaacgtttagtaccaatagcatccaattcatcgataaagataatagttggtgccttttctttagccaaagcaaacgcatcacgaaccaactttgcaccttcaccaataaacatttgaaccaattgtggtgcagccaacttcaagaaagtggcattagtctgagcagcacatgcccgtgccaaaagagtcttacctgtaccaggaggaccatacattaaggcaccctttggtgccttgattcccagttctttaaatttatcagctcttttcatgggcaatacaatggcctccaccagttcttcaatttgtttatccaatccaccaacatctgaataggtttctgtaggtttttcgtcaacttccatggctttcactctggaatcgaactctgatggtaaagtgtccaagatcaaataagaatccttattaacaccaactaagtcatttggtttcaatttatctggatccacaagaccaaccattggtagaaacacggtttgtctggaagaagtttttactactgcagctttaccctccactgtattatcgagattcacattaccaccttgtgtgctggattcgctattttcttttgaatcgactttatttaaatccattatttcgacgacattagccactaaataaggcaattgtctattattcttaatcttttctttgttatctttgatcttttctatcatgacatttttctcatgagccaatctttgtaattctgatttgaaaatacgaatttcattatctaagagcttacttcttgtctgtaattcttgtgcggataagcttaggatctcctgatccaattcttcgtcttgttgcaagttttgggaatccagttcttctaaagtagccattatttatttatttatttatttgtttatttgtttgtttatttatgtatcggtctatctgtttattttttgttttgtaactataaataggattctacctcttactgtatatttgcaaataccttcttttctattacttgaacttaatcaactgtatgcaacttaactcaccagttcatgtaacaaacatacatatatataaagatataaatatatatatgtaaatattagatattggatattaggtatttatgtgtatttctgtgtagagagataaacctttatcttttatcttgttttatcttattttattcttaacctgcatcaagattgccaccagcaaactgccagtgtacctttctccacaaatttcctcgtattacccattaacatcatcattgttatcacttaccattttattatccactgccaataatttattttccagcttttgggccgggtgtccggatgtgttttctagaaaagccgggtaacggggtcacaacatcgtagtgacaacaatttcttacaaaatagatgaataaatattaaacaaactcgaatagaatggggacactgtttactgtggtggttggccttattatgtaaatataaatacgtatatgtatgtatgaatggatatgattgtctgggtgttatgtaaaattttaataaaattaggaggaaatataagaagtattagaaatgacaaacaaatgataaaaatcgggtttgaatatgtgtaatatgtttataaactcatcacctaaagtatcataataaagtgtgtgagaattcatgtacatcactttttctgatgatgtacaatctcacatcattttccttctattatcttgcctactttatgtttttactcccatcaatataaaaaaaaaagaaaaagtaagccaaaaaaccaaaaaaaaaagatacttataaccttatggactaccatacaattcccttttgattcttctgtctttctttctatttcttgtttctttttttaagtgtttgtcgtgcataattttgtttattattataacttattctgtctatccttgcgtaaacattaaacatatatctacaatcactgttgttgttgttgttgctgctgctgctgcttatgcttttctaattcttcttttaaattggctgtaaagttatcatctacgtcaacgtcatcccagttctcttcccataagttttcggttaaaccagcagctttaactgtctcactgtccggccatgtatccactggaaaatcttcaaattggtcatcttcatctaaagtcttcttaataaatgattcttcctctgtgttcatctttgatgactcctttacgattgtttcaccactcatctttgttatatatatatatatatatatgtatttgcgggtatatggatatatggatatatgggtctctgttttcttgatatactaattaatttaatttaatgtcatttaaccaatagtaaaccaatattattttttgctactcttttcaataatgatatttcatactactcattcaaggtgtcccctgaggaacaaacactttccttcaattgcatcaaacaaaaaaaaatgcaaaaacaacaaattagaaaatgaacattttctaatttttgccaccttctactgagatcactgcacacggtagtagaatgtaatgcaaaattagagaaacgataataaattatacaaataaaagtgatgatgacatcacacacacacacacatacacacatacatatacttatacatgtatgtattctatctcttgctcatgtgcctgtaataatattaaaaccttgttacagtagcctctctcaagggtaatgttattttactattgaatattcgtacttgtacttaataaccaacacctcgtgaacatgggcttcgtatataaggatattaccgaactgtccaaaaataaaacaaaaaaagccctgtagggggctcgaacccctaaccttatgattaagagtcatacgcgctaccgattgcgccaacaaggccttagctgctgttggtttgctagaaagtgataaattttgaacataattaaattgaaaattgaaaaagtataatgtttcacattattgatctttgatctcctaaaacaacactctctggaaatagtttgaataacatgaaaataaagtttattctcttcaaagatagataccaactattaaaagtctactaagacaatatactacaagatgattagtatcataaagtaactctgttaatagattcatacctcactactaccaacccaatgtatttgcacccacaatttcaacaaaaatctttaaaacataccgttttcgttgatatatcaacgttttcaaaagaatcacaaaacatcaatttcacaaactcaagaacatacagaagtatatattttagtttgttattatattcttttacacaaagacaaatattttacataaagaaggtacttgaaaattcgaccactatatttagaattatttcaaactatcaaattacaataaaatggatatgaattaaaccttttttcttttttcttttttccataaggatttaaaactagtaataataagcacattatatatatagtcatgatctcttcatatactcaaaaaaaattaataaaacagctatctcctcttctagtttagaccttctcattgtgtcacattttatagcgaatcatttaattctgaaggtagaaaactacttatttcacccaacgtatatttgcttattttctgagaatcaatatcctgtggtttgttttttgtccttgttttattaatgataggtaaaacttttaggtgtttcatttatccacgtcaagtttgaataaaagtaatacacactatgtttcattattctaatatagaaaacaaaccatatatcgtacatttggttggtcaaccacacttttattaagaaaatatcgttcattcttatttctcaacatttcataaggtgttaatggactatatataaaaatgaacagaataaacatccaaaaaatgtttataccatttgattattttaaacggtttgaaggattatattttatgatatttttcttattattagtagtagtagtagtagtatgcggtttcgttttaagttttgtatgaggaaaaggtattcatgaattaatggctccaaagaattaaacccaaagtattttataagggttatctcaagtgatatactaaaatatggatattaattatatatataagcacttacaaattatataattggttgattccaactattaaatagagtagtcttggatattcgtctcttcttcttctatatctattagatagatcataaatattaatgctgataattacctctgacaccatctctcaataatcaagggtctcttaagtaagcttcttcataatctgccaccaatgtctatccgacgatcatatgttcgttcgaatacactcacaatcttgggcccagagtttcgattgttccaagtccttcacctcgacattagatgttatcctcagaattgcgtatttattaaatttccagttaggttccttacatatttcttgtaataataaaacagagtggtattctaaatctcttaactattttttttatttttgaacactcattcttacttccaatagttttgtccttttgcaaataatttataataacaacatatattatctatgtattgtttacttcatatatatatatatatatattatttgataataacatcaataacatcttcatcttcaatctcatgatcttgaatacattttcctaaatctaattgatcattttcaaatgacagtataatttttttgttttttggaatttgtttttgtattctataataatctactaatttttgaaaagacgtcgaatttctaacattagcataaactttcttattatcttctcccctcagagcaattttaagtaattgttcgtttttttcttttctctcttgttcttctctttctagttcttgcccagattggaaattcatatcattttgatccaaatccaggtgtatatcatctagaattgattcgtcgtcgaatattttttcattaaccatcctttcatattctgtttctttatccttcgataccaaaacaatttcaacatcagatatctcattttcaaaactttgtgggatattcaaagaattacaattcataaatctaaacaacttcatactctcatttctatacaacacaacattatcgggttcataaaatctttgcaaagatttaggtaccttataagccttaactaatcccattaatgccggaggcaatatgttttcaaaagtatatttacccaatactttaacatgaacacttttatttattgttccttctaatttagataaaaagtgtatcttatatattctttttgggtttgaagaagaagtggaagacactatattacaattattattattattgtcgttacttgttgattgcaaatctaagtctattgtattaaatctattatcatcatcattaatatgatctttagccttattaatgccaagactcttactatttatagacgagctactcattagttccagttctttgaaaaaatcatcattttcgtcattctctattaaatcagaagaatgcagttggttcataatttttttacgtcttttcatttcagattcaaattgactttcaatttcaaatgaacttgatctacttctaacccttttactacctgtatctctactaacggaactcaaagaactttcccttgaagaaccagaggatatagaaatatacgagtttcttgttttggaccttcctcttacctctgttttgtttatatctgtattgttatccgtattctcatcagagtctataatttgtgtgtttatgttattaaatgtcggtaaattgtctactgaacttgatagattaggccgtttagaagttgtatttccaagttgtttctttgattgaatcaagacagtagagctattgtctatatcatcaatatcatcccttgcaacattaaaaaaatcatcatcaaaatcactcatgagtatattaattagcctacaggacacgaaagaaaaaaatttttaatgaatatttgtctagctactactctaatttcgatctaatactgatttagttatttttctatatggtaatgaagcatatacatatttacacagatcaacccacctacgcagtttattcgtctagaagttgtctcacctagcccagtagagtccaatggaatatcttggtctgccacttgattctcaaaattctgcttttttttttttttttttagttattgatgtttgatcatcgcgagtaagagaaaaataaacatgaaatagaaaacagcttcgagcctctgcaaatcccactgtcttcgacaaacccacagtttaccagaaatcctgcaagaactgtgggtgggtatgcttgagtgtgcgtgactttatctcatatacttctttgaacacctatctagtgtgtgggtgtatccatgcttggatccttatatatctaaatgttagatgatttgactgggtttcgagggattaaatagactaaggctagatttatctgtctatctatctgccaaacccttcctcttcttcttctttacacacacatatatatatacataaagaagtactattatctaccaattgtaccattccatatgctccttctctcctcctgttttctccctcccactgtcttctgcttaataaaagatacttaatatttctttcatcttataccatattagaacaggggaagtaaagacaagacaatacaagaaaaagggaataaaaaatatatttatcattataaaagatgacccaattggctactaaattgattcatgatgatgataaggacaatcgagtttctgatgtagctcccccaatcaatgtctcaacaaccttccgttacgataataatgacttgattccttggaatgaacgtgaagatttagatttcatggaaaggagacctatctattcaagactagctcatccaaatgccacccgtctagagtccatcttctctgacatcttagacggtcacgccatcatctacaattccggtgtctctgcattctatgctgctgtcgtcttctttaaacctaaaagattatttatcggacaaagctaccatggctgtcgtgctgctgctaacatcatcactcgtactaacggcatggaacaatatccattggaagatatcgcccagtatgcacaagaaggtgatttgatccatttggagacacccgtcaacccgtacggcacatcttttgatatcaacaagatcgcacaattggctcattcaaaaggtgccagattgatcgtcgattcaacttttgctccgccacctttacagaacgtttgggagttcagttgtgatattgtcatgcattctgctacgaaatattttggcggccattcagatttgttgagtggagtcattgtggtcaaagatcctcaagtggctaaacaattaagagaggatagaatttatttaggtacaaatattgcgagcctggagagttatctgttgttaaggtctctaaggactttcgaaatgaggatcctgaagcaatcacagacggctaccaaaatagtaaagttcttgaatgaaaaccgttccagatataataaagtgctagataaattgtaccattcttctttacaaagtgaaccctttgttcgaaagcaattaaaaggtgggtatggtcctgtgttttctttgtccttgaaaaccaaagaacaatgtaaacaattcccattgaaactaaaatatttccatcatgcaacttctttaggtggtattgaatctttagtcgaatggagagcaatgaccgatccttatattgaccaaactttaattagagtctctgttggatgtgaagatccaaatgacttaatcgaagatttgaaaaatgctttacaaaacttacaagattcctaagatattcgactcttgaaaaaaaaaaaaaaccgtatagaaatgattatatacatacatacatatacaattaaatcacatgtcctttcttttcttttcaatttttctcttgaagttatgtaacaagccttttcttggattagttccacttcaatagtatatgctcaccatatatagtacataaagaccctatcaatattaaacaatccagccttctgtgagtttcactttcacacacatactctctatacataaatatatatgtgcgcgtgtctctctctctctctctcttttattttcattttttcttatattttctatttctattaagtgattttttttctattttattttgatgttaatactctaacagttctatatatatgcatttggttcatttcccgatgtaatagtttactgacacacatttacatttcattgaaggagaggaaagaggttatctaattgatagaacaagtcagaatatctaattaacttatatagacctcctcaaagaaaaagaaagctagtggtagagttcatttttgcaatgaatgatcatcaaagtcaaatattagctcaagctgttcgagctctttcacaagagcatgatagtgcaactactacaattacaactccagaggatgaaaatacacaaagaaagaatgctacccctagaagaagatcaagaagagcagcctcacagaaggcatcggagactttgaataaaatggcatctttaaatgatactactcaaatagaagatgaggataataagggtacagataataacgataatttcttagataatatagatatagctattagatcaaacgatatgattagtaatatgaaaagaaatatgaagagaggttctaaaatgcctaacgtaaatggaactagaaataagaaaaaagtgaataggaaaaagaaggcacaatctgatgatgaggattttgtattgatcgagagtgataaagatagtgagtctgaaaataacactagtatagtggaggatgactatgacaatgatatgatgatagatgacaatctgaaagaagatttgaaatctgatcaaaataatgataatgattttgtaatagatgaaggagctactaaaacaagaaagaaaagaggtagaaaaccaaaagaccccaccaaaataaatcaacctaaaagacaaaaagctatgtcaaaaaaacaatctatatatgtgactaaaaataggattattagagctttgaaggagctatctagtactagagataaattagaacgaatatatggtttaaataaagataaattattacaactagctaagattaaagaaggttttgaatctaatctttttgatttcccaaaatctaatataagccatgattccaaattttatgtaagtaatgaaccagcttgtaataaattccaaataaatgatgaaatgtttgttcggaaagagaccaattatacacaaataaatcaagaaaccttcgaaacactcttcatgtatagaaaagaaccattagatgttattgtaggcgagttcgagtcatctctacagaatagagataagattgagtttccagtgtttgaaaatgataaaagacaaggcctcatatataattcaggtgccttaataactgatattgcatggttaaataaagagtctgacacagacaatatagaagaaccacaacatcagtatttagcaattgcactttcacaatatatggataacccatcagatccacatttagaaatgtttgatagagagaatcatatatcatgtattgaaattatagaattcacaccagaaacccttaaatttgtcaaacgacaaaccattttacatgattttggtgatgcttggaatttaaaatggcatgaaggttataatagtgacaaaaatataggcttattaacatttattgctcaagatggttcattcaaagctttacagatccataatgtagaagagaaggactcgcctgttttattgcaatgtacaaaggcttctatctcaatatcgttaaatgattcaaatataacatgttttgattacatatcacccacatccattgtatgtggttttaaaaatggatatgttgcagaatttgatatatttgattctaatcaaataccctcctattatcataaaattcatgatacatttattgtatctatagtgacaacatattcgccgtttgaaccaactactgtaagcgcgttagcagttgatggctatttccatttatttgatccaagagatatatttagcacaaaatgtactgtatcaagacttcgtggtaataacatcatgccaatagtatatgccccacaattgtccttgttattgttcagtgatgcatctaattctattagagcattaactgctaaagcatcatttgcaccacataatgttatgtcaagagaatccacagtaacctctttgggaacagcaaaattccatccctttttcttaacaggtactgctgatggcaaagtatatattgataatttgtcgcgaaaaattttaactgggatcaagaattctaatactattcacaaatccctaaagttatgggggtgggattatgatatgcaacagaagaaatatagattagatcatacttatgaagtttgtaggtcagttaatggtgaaatcaacaaaattgggatacatccgcctggtgtctcaatctcctctatcaagtggaatgaaaccattagaggctgtaagatttatgcttttagtaataatgcaggattattgacaattgaaaaattaccgcttcaataaagatacaccattttccaaataatttggaaaggtgttacgtgtaaaaagatatatattaaagtataaagatatgtagaaacaggaatgagattatattatgaagagtttttatttttatctttattattaatttttagtatatgttatatctaatactttggtatggaaggatctatttcatcaatatatgagaaaaagccacctttgatatctttaacatttgatattttgaaaacatcttttagaagcctggtagcaatttgagaatcattaccataacgacataaaaccagcaattcactgttatcgttcaaatgtggtatcctttcccttaacttatcaacagagccattcatatctttcaaatcttttactggaatattaatagcatttggaaaatgtgatatattgaaatgatgtgaaggtctaacatccaaaaggatatagttgttatcctttgaaacagagtgatagtcactttcaaacatttctacagatatcctttcatcaggtgtgcacacattataatttcttgatccacagaataattcataattaatttctccagattcgattgtttgtctagtaatagttggattatcaccacaacatttacaatcagacttcttgttacgcatcttaaaagttctcaaagtttgttgtggaaaacctgagtacatcattaagaatggctggaaattgtctatagtgtaaatatctaagatcaacttaatagtttctacagccattaatataccaactaggccaatacatggaccaataacaccaccttcttgacatgaggaaacagaattaggtggaggaggagttggatagaaacatctataacaaggtcccacttctttaaaattcaaaattgataactgaccctcagtgcccaatccggaagctgatacaacagtgatacctaagttgacggctacatctgatattagatatcttgttagaggagtgtcagtgcaatctaatatatagtcataaccttcaaagatatcaaatgcattactgtaatctaatctaactggatatgtgataatattgacgtgaggattcaacttagttaacacttgttttgcagattcgcactttaacattccgacttttgtagaatcatgaataacttggcggtgtaaatttgacgtgtcaacagtatcgttatctacaataccaatttgtccaatcccagcaccagcaagatatggaagagcaggactacccaacccaccagcaccaatcaccagtactttagcatttttcaactttaattgcccctgaacaccaccagtactctctacaatcatttgtctcccataacgtctatattcttcaagtgataatggataactgatattggcagaagacgattggaaattgttgacttgtttcttcagtttagcattttccctcttcagttgttcaatttccttcaaaaggtctttaacttcagacattattagtatgttatcgaatatatatgacaatattatcctgttatgtgtattagttcaaagcaacaaagtagaagaaaaagaaatattccttagttttgtttttttgttattattttttcaaaataaaacttctatatttatatttatattctaatcttaatttgtcaccataattctaaatttgcgtcttaacaccctacttcaaatttactcttggtctcttactattaactcttttcatctcagaacgaaattgtcgcattaatttcaaatataaatgtatatgtatttttttttcacccgagtttgtctcttaggaagtaccgatgaggttgaatgaagagacaaaaataaaaaaaaaaaatttttcactgcagaatgaagaagtatgatgaagaactcaatgtattccataaaatatattgacttagtattaagtccaagacgtatttgttattttctcttttacctttttttttccatgtcttatccttaagcacgtcatgatagtattgactcaagaattctgagtttgaggaaaacaacaacaacaacaacaacaaaaaaaaaaaaaatacatatacagattgaatacaatggttactactcttaaattgagtgaattaactagtagaaagagacgtaatgaagagaacgaaaatactagcgaggagtctgagatagatattagtagtacagattcggagaatgagggtaaagtcggtggtgaagaagatgatgacactgatgaaattatcaatatagattttgatttctataatggtaaccctgacatcgatttccatgcattaaagaatctttcacgtcaattatttggtccacaggaaagtaatagaatccaattgagtgcattagcagatttgatgctagcttctccaatgaccacgatcaagacagacggtcctgagtctgatccatattgttttctttcatttatcgattacaaagataataaaacatgtgactatgtaaaatatttaataaaagttgatccaaagttgtccactttcctgcaaactatagacaatactggcaataaatcgtgtgcattagttgtaagtgaaaggttaattaatatgccacctgaagtggttcctccattatataaaattactcttgaagacgtatcaaagagcttaaatgaaagcgataaggaacattatgacttctatttgattgcgactagaaaatatgaagtgaatttcgatatagatgatgattcatctagaaataataattcagagaggtcaaataaacgtgttaaacaggaagagatcgactattttcatgaagaagacagattctttgagaaatacgcaaagatccatttcgaaaccgaagcaagaaaaggtattatcagttcttatatggtcttaacacatgaagggttgatatcagggattgaagatttagaaaatgaaattgcacaatggtaacccaatgaacatacatacctacatacctacatatacatacatatatatatacatatatatatatacctgtatccaattttttgtatctacttgataatattattaacatttaaatttaaataaagcggaatgcatataatccgcttggatatagattttccgacattgcggttttgcttttctaactactttccgccattttatttattttgttttatatttctcgctttctttcttatttttttttttgttttttgtcgcagaaaatttagagaattacgtttaaaggatgatggatgtatgtttagataaagaaaattagagagaaaagagaaaaaatatctgataaggaagaaaaacgataactgactttagcacaattgatagagttttcttatagactaacctattccccctttttttataccttttctccttttattttctattattaagttatcaaatcttattttattcctctattaaaggatcagaaattagtgtattaaataatctttataacatatcttccagtgtatccaattcaaactttacacataatttggtttgattgatgtgcgttgttaatgacaaataaaatagcttataagaaacttttagaaatcttcaaatgtcatctacgtttaacacaaatatacatttacatatgtcaaatctaaatcaaacaaataatggtacaaaaaatgaagtgaatatttcaagtaatagcacgaacaatagtaacaatgacaataataataataactataataactatattgaccttttaaccattaggaataaaaaattgattgaattgtattgtgtatccagattaaatgaattgttgcatattaaagatgaaaataaatttaacaatgaactaaatctgtttttaaataaaaatgatattaatagaaataagagatttcaacttaatactttacctaatcaaaatcaaatctctttaccaaatcaaagcccaatatcttccccatttaattctaatattttgccaaaaggttcattgaaaaatattagaaagaaaagtatatcaacaactaatattcagacgttgagaaataacagtaataatgataataatctaatcagtaacactagaaataacagaagtaaaagtgtagcggtacctactacttcaacaatgccaaattataaagcagaaagtgtaagtcctgacaaaaaaaacatcaagataccattgaatacgataaatgttggagaaataaggacaatttcaaacgattcgaattttacaaacaataaatctttttctactaccgtaacacccaataatattaataataccggtagtaataattcttctaacttagaattacaaaccggtaccaaacggaagggggatagtgtaattccgaatatagatgatcctaatcaaccaatccgaaagaaaaataaagtccattttgaagatgtcagttacacatacaaaaatataggaccaacaatatctaccgatacaataaataccacacctgtaaattcaaagaaaacacctcttataagaaccactttctatatcgatcctaatatgaaaccacctgggataactccagtttcatccaacgaaaaggtaaaaactccattacttaaagatttaatagaagagaaagaacaagtgatagaacgtacagatggatatttacagaacaatataaatgctaaagattatgtgtacttgctaatgaaagataatattccttcaaaagtcccacaaacggtaccgttggcagaattacgatacatggctcaaacattacctttagtaaatttgattccaaaaacacataaagcattgaccacagaaataataaatagtgcattaaatgagtcaagaataactgtagtaagttcaaggatcgaggagctgaggagattggggttatggtcattgagacaacctaaaaaatttattgatccgtggactaataaacatacatattatgaaatattattggatgaagccaaatggatgcaagcggatttctacgaaggaaaaaaatataagattgctgtatgtaccacaatagcacaagcaattatggattattggaactatggtaaagtctgttgtattaagaccaaaccaccaaaatatttggataacaacactaaaaatgttaataatggaaataatgagttaaaaatattgtctgaagattttttgaaaccagataaagatacacaaaatgttactaatagtcaaattcaacttgataaaaataataatttgaatgaccagaaaaaaaataataacgaggacagtaaaactgttttcgaaaaaaaaattagtacttctacagataatcttcacaatcagacatgtcttgataaatcagatattgagcaaagtaagatagctgaaattaacaatgaggttgctatagttaatgggccttctaatggagagaggaaaatttttattgatagaggttcaatttttctagaaaatattgcttctgatataaacaaaatagataaaaatacaactaaaccaattccttcttcaaaagatgacaagaaacaagaattatctaataacacaaaagatgcggagacaaagaaagatgatattgacacaattgtcataaaaagtaatgataatattcacagcttgctggaaacaaaaagcattgatgtatctaatctattagaaaaaccagacttatctcatgagattaatctaccagaattaccagaatattctgccgaagaatatgaaaaaatactctcagaaagagatgttaaaccatttaaattatatgtatctctatcagaattcagttcaactgagaagaatattatatatcaagttcccatttatacgggtataaagaagaatgatgaactaaaaaaacataatagtattccttttgcaccaatctccaaatcaattgtaacattacaggacgaagaattttataaattggtagaaagacaatttgtcgaagaagaacaatctttagtccaattaagcaaaagaagaggaatgttttatggaaataggagaagtcattacctaagaccaccacctgtcccatcactaaaatacttacaaaacagaacaccaactatttggcttccagaagatgatcaggaactagtgagaaacattaatacttatgcatacaactgggaattaataagtgcaaatatgattcatagatcaagtaagtcatatttgtctaatattgaacgaagaacaccttggcaatgcttcgagagatttgttcaactaaacgaaaagttcaatttcaatgatttgaaaggtccaagagcgcatagtgcacaacagtggttaattgaggcacatagattccaacagagacaaaatagaagaatctcaccattaggggttggaaatgaatctgttcaaagaggtcacagacgtttacgttgggccagtatgtttgaggttataaggagatgcattaaaaagagagaaaatgtaccacggccaaatcctacacaaccaagaaaacctatggattgtaggaatatgaagattccaacaccagctgagatgtcacaattaaaagcccaaagggatgaagctctaagaagggatatgcaattgaggagaaatgctaaaaatagactacatcaaaagcaattgcaaacagcacaaaataataatcaacatccaaatcaaagtcaaaactttgctaacaattcgagccaggtacagaatgttaatcgtcaatctcaaatatcaattcaactttcaagggggtcatcaagaaatcaatccagatccacagacaataataacaacattaacagtaaccctcctggtaatatagaaacaaatatcaataacaaaaatatcccagtaagacaacatgtcaataacaatagtgaagttagatatactgaagaagagatcattgaactttatgctagaaaaattcaacttcaaaaaccaaatgtcacccttgaaactgcgctccagactgcaagaatatattacaagacattaaaaaatgaacaacaacaacgtttacagcagcaattgcagcagaatttaacacaggtgaagcaaagatcgaatcagacaatttcacaggtacctaatgatgataaatccctgaataatctaccaacacacattaataatgaaataaataataacacttccataaagaatgcatttgaaaataataataataataataataataataataatagcgagagtagtaatgataatagtggtcagagtaaaatagatactattaataataatctacctctacagacaaatgagactattaagagtacaatccgctcaccaacaccaggtgaaatattacaaaaatttcaaaaatagtttaaatattataatatatcttggacatcattaaacagataaatattatatatagggtttatttcactaaaataattaattgcataatattcctactatatataataaaggagtgttgaacacttatcaataaatctgtaccatttaagagaattaccagggatatctaaacaatgttctttcatgctttcatgcaatcgaatatttgaaaaaacagatagagtaataaaaaattgtcagccactcatgtaatagagtgaatagtaggcggaatacacaaatgtttaatatatatatatatatatatatatatacatatatcgttgttcaatgattataattgttcatttcacttctttaaatctttggtaatgttaagatagaagtattttccattggtgaaacaccatttatagaataagtaactttccatttcagtttcagtggtttggcagaattaatcaatgcattctcaatccaagcttcttgtgtaataccatctttaatattagcactcaaaatgctgctggattgaggttgtaatttcaattgcatggattttggcactgccaatgcaaaagttacaccagttatttgactaaatgacaaattggagaaaaagattttaaggttaataacagaatcggattctcttctaatttccaattcaatcttaatatttgaatctgtgttaactaatattctttcagaggttggagaagttggttgtatagttggcgtgctaaaatcacccaacaaatccagtgtgtttgttgtactggtagtattattaatgctattattaatgctattactattaaacaaattaggttcagatcctaaggaaatttcaccaacgtttaagaaactatcttgatttgaagatttatcgtttgagagggataaatcacctaataaatcgacaagtggatcatttgaagaactagtggagatttgcatagtattagtgaaaggtgctgaagctatattatctacagctgtattatcgttatcattatcagtattgtcaaaatcaatcaagtttatttcattagccagagctcccccagtagtcttaaagttgttttccgttgagatagattctggattaatatttgatgcagcagtcttattaccagctttaattaaagagtatttttctaataattgattaactacatcattaaatttcagcaaatcttgaactaaattgtcatcttcgtgttcttcttcaatgattttttggaatttaggttgggctgctttcaaggatccataaagttcttcaatagtttcattatttgttaaatctgcatcgttattagatgtattcaacatttcattcaataaatctgctttacgtctcaatttgtttaattcgttattaatagcttgtttagcatggataaggttgtcttctttaaaaccagccatgattttcatcaatttgtttgcttcttttagatcttcgggtctaccacttctaattaattcctccaatttagcggcttgagcgatttcttgttccttttggatttcactagctgtctttaattgatcggtgggtctcataacagccaaatcttcagcatgaattcttggaaaaatgtagcctttatatttcaataatcttctcatatctctgatataattcaaatcatctttgtaagttgcatgtttacaaatggtttggtaccattcctcgatagcagttaaaatcaatttttgaacttttgagtaacgtaaaggtgggttttcagggaaccttctaaccaattgatttaaaaattcttttctggagatttgcaaatggataggatatccacagttttttacaaggacatctaaaagagccaatgcaaagacagcagtgtgagtatctctattattaatcaatttgacaatagcattacatgcgtcataactagtccccccctgtttttcattaatgtaatcggcgatatccaaattaagagctaagtcaggttcgagtaaagacattctacaagccctctgaatttttctcaatagggtattccctgtagcaggaggtcttctcactgggcgatctgttaaataaataccagacattttataaacctgcttatctgatcgcttatgtatttgttaattgaaaaaagtaaaaaaaaaaaccaaaaaaaaaacacaatcttatcttatgccgtcctcttttaatgggaagttctattctagtggcaatatatcaactagatcaacaactagcaattttaataatctttatgtttgtctggttttctctttcaaagatcacatgtttatctttcctttttgtataaatcaaatctttctctctctctctctctctgttttctttttttcttatcaatccaatggccttcggaatttctttttcattttttttttatttttaaattttcgaggattgttatatcattttcaacgacaacggatattacacgaatataaacatgttccttcttcctctattttccaccttgctacaagatgaaaacaaataattggaataagagattgtaaagtcaggtagagtcgtataacactcttctgtagttggtaagtaggataattcatgcttcatatgagagtatgaggtggatccacatgcttttggaatgggtcagaaagaagacattccacaggaagaggtagtaacagaggaagagccaggaaatgattcacaaaagatagatcaagatgttaatgatctagggataaatagattgattctagattatgactacttgttatataagatcaatgattatgtacaatcaatccaattaaggacaaatcttctatgtatggaacaaaatagattgattgaagcggatattatcgatggattaattaatgcaaatattgatcatttaaaatatatattagaaaaatgtgacgaattggaaacacattttgatatgatggatcaaatcgaccagatagttcaatcttttaaagaccgtttgcaatctattagatcagaatataatcaactaaagaaaaatgaaaaaataaaataaaataaagagtaagggtgcaattgaatgatgcttgattgtgtatattatatacgtatatatgtgcatatgtattttatttttaccaagaaaatctatcattattactatcataaaatttttttatcttcctttcgagatactgcaaccttctgttatatctactattagattccataacttcctttaatcttagacaacaaactatttgaaaaatcctttttctaaatttatctcttaacataatttgatattcacttttataaaatctagcaggtttatctgcatatggagaataccttgtaaacaatggcgatgatgataacggctcagatggttgtagattatttgttaataactctttcttaattctatttgaatcaatttgcatttgttgtattgtagcatttaatacattttttaaatattcattgataatcttttgatcattatttcgaagaacttctctgtgatattttagtctataataatctatcttactgtcttgtatattaaattctctattcagtgtcatgtcattgtccaaactggaatatgatttctctgtgtctcttgaaaaattgtttaaccttcctttttcatacattctctctaatctgatattttcattctcaagatctattaatctattactataatcaatcttcctttccttatacttatttaataacttagcgaatccatcggataattttgagtgagagtcttttaattcaatattcgttgtttttaatttatcattttcaactattaatttattcaaattaaactccaatctgtctatagtttttaaaagttcaactttgtcttcattcgacttgttaatttcgtttcttaaatttttttctttatcagttaaggaggaaccaaattttgagggtgatatctctcttgttgccgtggtatcacttaattgtctttgtaataaatcattcagtgaatcatacctttttctccaatcattaatttcatcatttaacttctcaactgattgattgtattctttacttttattatttatcatatcatttaacaattttatttcattctgtaaatcttttacctttgtttcattcttctgtaaaaatctattttccattaaatcatgtgtttttaaagtcttgtctaattcatcattcaatttatttaattctttcttcagtgattggatctcattattcttggtattaataatatttaaagtttcatctgattttttaatcgtcatttgaaatacttgattctctaaatttttgattttattgtttaatttaattatctcctcatttttagatttgatttgatcatttaagcgatctcttgtctcttcaaagttatgtatctgtctaattagcctagttatttccctttctttatctgttataacactagtctttttagataattgatcttgaatctcttgcaattgccctttgatagataatatctctgtatttttggattcaaccaattttgattctctttcattatttgtccgaagtttactaagttcgtctttcacatcattcaactgagtctctttcttctgaagtttttgttttaaatcactaagttcattttctaatgattttttagttaaatggtaatctgtttctctttcatttaaattgtccaattcgtactgattagaagatagagtcttttttaaatctataatctcttgttttagagaatgaataacattatttaattcatctttattctttaattcctgttcataatcgacctttaatttatttaaattattagtcatttgatgaatagaattatcccttttttgaatctcataatcatatcttgagtttaactgtttgtaattttcatttaattccttgtgcttctcttctagatctttcaaatttttagtcttattatttaaaatgatttgtaaatcttccaactcgttaattttatccttcaaatccctttcatactgcgaaattttctgtgtgtgtaaattttgtttatttattaaatcattctgatcattaatattattttgaaaatcttgaatattttcttgtaaagttttaatctttgattcatacttactaatttcggaatctaattgtttttttagtgtgtttttatcattttgtaaatgttgaatcttatcattaaaagatacttcttggctttgtaataattcttgagattttttcaatttttcatttaatgacttaatttcatttaaatgttgatcttccaaatttgataactttttaagttcgttttctaatttattcaatttctcttcagtaattttgttcaattctataatttcgatgtttttttgatctttataagctatagtagtagcattcttcgtattagtatcttttaattcagtttcaagagattttatcttttgattcatattttcgatctctgagttatttttttctaaaagagatttcaatttattttgttctctctcacaatcttcatggatattttgcaaatttttactattgtgtttatcctcgtcatcttcctttgctaaatcatttaatttttccttcagattattaatttccaattgtaaagaattgttatctctttgtaaaatattattcttatccttctccctagacaaatcgtctattaactttaaatttgaatctaacttacttggatcatcttgtttcaatatattaattaaagcatcatttttcagtttcaatattgaaatagtcttaatataactctctattctttcctgttgttgtttaattgggttggatatattgttatttgatattatatcattatgatctttatcgaattctgttggtaagatattaggtaatattcgatttgcgctcccattaacactattattattatgagttatttcaggtatggtatcatcgaattgagaggcgtcattaaatagtctcatagaattatttatactataacgcacccgttttttcatgggacctaaatcgtcatcctcttcctcctcatcttgattctcattttcgttcccttcttgtatgcttgacacattgacattttcatcaattgtagtttttgatatattcaggtccaattttttaggcggtacattattagtggtctgtgaagactgtttgccctttatatacccaattggagtaaattccatagtttaatgcagttctatccttttttttttttggaagttaaacagaaaaagttataaatggactaaaaaagatagtaactatagcgatatcactatgtcgaactattctttccttctttttctctgctgatactaaccaattaataacagttgtatctatctcttacttatctatatgaatttacttattttttttatttacttcgataataaacagaaaaaaaaataaacaactgcttgacgcgtttttgtgttaatattcggaaaaaggggacgttcttttttacaaatatgaaaaatatgagaaaaagaagggaaaaaataaaaaacgaaaaaaaaaagaaatagttttcgtgccaatgagttagggttttgcatttatttttccaatatcaactttttttaaggaggggtttgataggaaaagttggaaattttgatgaggattcaacagccctattgactaccgaatctattgtagaataattacttacaattaattagaaatctgatacattagatttcaacacgtgatatgatatatatatatatgtatatatatggttatatctgaagtgtctatatatggatgtgtgtgtatgtgcagtaatagtaatagtaatgtaataatggtagtattacaattattgttatttaaagacctttaacctcatcaataaatcttgataatgacctcaatgcactaccagattgtatactttcttctgctttcgaaataccttgtttccaatcacgagacccaacacttaaacagtataacacagcagtatttaataaaatataatcatagattggatgattatcacccaacttgtatttacctgataaaatttcatcttttaatatatgtgcattttcaatcggacctaaagataagcattcagataatggatgttctttcaagccaaacatgtatggttcaatttcgaatacttcaatattttgattctttttgttcactgtttcattatttgaaacatgccaaattgtggttttaccaataggagatatttcatctaatccaacatggccccaaactacaaaaatttcattatttggatacatcaaagatgctgcttttgcgtattcgaatcctaattccttggaatagactccaagaattcttttatttacagttgacaccactgggtgcaataagggacctagcacgttaaaaatagttggaatacccatcagttttcttattaatgcaacagatttcattccgttatggaaatatggagctaaaagaaataaaaacgaattgttggaccataattgaggtacagtaactgaattaacctttgataggtcacagcctaacctagagatcaaatcacctgctccactattcgatgtggatgccttcccgccatgttttacgattttgatacctggaatcccggacgctacaatcgcagacgatgtggaaacgttaaaagtattttgtccatcgccaccagtacctacaatatccataactactagttgcttattgtctgtggtatcataatttatcggttgaggtggaaccagatgggaataatttagtacggcttttgctgcttgaacaatatattcggctttatgatccaggccagtggttctaagacatgacagaaaacttgcaattttgatcatattggcattttctgtgtcatcactaggattatttgtatctaatatctgaattataatgttaatagtttcatataaatcatttggagttaaacttggaggcgaagttaatagtttatttgtgttctggacaatcgtatccatttcttcttgtttcgttatagttctttatattattgaatatcgtaattttaatataactagatctatagtatacgaatattgtatgagatactatttttcttttatggtcgtgtatgagtgtgaacaatgtctaagcagaggaaagaatcctattctagattaatactatttttatctctatttcaatttttttttccttctttattttctggagcacaggcttataaaattattaaaataagacgaacattgagagataaaggaaagaaagatgagtcatccaactatatacacatgcatatatatatatatacagataacatatatatagaaaggaaaaaaaagaagaagaaaacaaaacagagagagagagggtataaaaaaggcagaaagaatatagtaaagtacagatttattcatttatatgcagtatacaagatatacatatgaaagagagggaaggttatgtatatgagagagtgcgtgtatatgtggaaaaataaataatagagatataacaaatccttgcatgggagcatgatcaaaaaatttattctagctcagttaaatatttttcacagtccaaagcagccatacaaccagaaccagcagaagtgatggcttgtctatatctcgaatcttgaacatcacctgcagcaaagacaccagggacagaagtcaaggaagaaccaggaacggtcttgatgtagcccacttcatcggtatctacttggccttgaacgatcttagtagctggggtatgaccgatggcgtagaaaagaccattgacttgtaaagatctttcttggttggttttgacgtcctttagaatcaattcgtttaataacttgccatctcccttagcttctaatgtgacggtattataaaggatttcgatcttttcgttctgttcagcacgtctttgcatgatagtggaggctctcaaatagtcctttctaacaatcatgtagaccttggaaccatatttggtcaagaattgggcttcttcacaggcagagtcaccacctccgacaactgctagaggtttgtttctgaagattggcacggcaccatcacaaacggcacaggcagagataccttgttgccagtaagtttcctcgccaggcaagtgtaatcttttggcagaggcaccagtagctaggatgatagaatcggtggtgataggttcttgatcttcattgaattcggtccaaagtttgaaaggtcttgaggataggtcgactttagagatggtttcagtgatgatttcagtaccgaatttgacggactgttctctcattctgtccatcaattcggaaccggttagaccttgtgggaaaccagggaagttttcaatttctgtggtggtagtcaattgaccacctgctgcgataccattagctagcataccttcatacatgacaggtttaatttcggcacgagctagatagatggcggcggtgtgggcagctggtccagaaccaatgatagtaactttattatgagccattctgtttatgttttgtttgattgaactattagtacgtaagaatcttaaaaccggtttgataattgtgatattgattgattaatattagtgtacagttttatggttttttttgttcaattgaacaaatactattacaaaaagagatggaaaaaatatgtttaagagattgacagtacgaagaatataaaagttggaatatatacgcgtatatatatatgtgtgtgtgtatgcgtctatgtgtgcgtttgtatatatatatttgtatttgtatattaaatatacgaaaaagaatagaaagtacgagagacaaagagagggtgaaaaggtgaaaggatgagaggcacttagtaagcattgaaaggatgttttcaaaaagaaaaaagaaaaaaagaaaaaaagaaaaaagaaaaaaagaaaaaaagaaaaaacggagagaaaaagagatcaggtaatcctgtattatgttagctgagtaatcaacaagacaagactcgattattaagaactgcttactcattcgagagaaagagggggagggatgtccaaaaggggccagatcgagattgttaagttaaacaaaaaggaaagaaaaataaaaaaaaaagtaaacgatttttcgagcaaaataggcaggcaagtcctccaaataacttgggttggcgggccagaaagacagatcaacagacagccagatcaaccggataacatagtagtagggtaacatagtggcatagaaacaaaagtacgggcccggccagctggctaaaacaaaaaaaaaaaagatcatcgatttgccaagaatattcccaaatcaaggggtgtaacattcctacaccaaacacattattttaacttttttttctttttgttcttttgtgtactcgagcaaaatggttttttttcttttttatatcctccaagaaagttctgcttcattttgtaaaatatctggcttacgttatgtataatggtaggttttactaatacatggtgtctagaattgtaaaaggttgagaaattttggaagaggtctaaagaaggttgtagcaacctgttcaaactatccctgatgtacacacacatgcatatctatatgtatgaatgtatgtatgtatgtatatatgcatatacgtatgtatggatcgtacagaccgtcacgttaggataataatggcgtctcttcactgactcttggtgacaatagttctctttccaatgttcttaatttcacgtcctctgcatacaaaatataatattgataaaagtatatcaaatcaaatataattgtaccagcactcccgaatataaacggtgccgctcttttaaggaattcaatcttatcatcacagtgaatgaaactcaaactagtcaagatactaatatcatatgtcacattgcccaacaacgtagtagcgaaaaggaatggcgaaagcccatctgttgacttacgttgataattcttgattaactgtgggatacgtgctcctacatagaaactggctcctatccaggataatattagtcctatacttgtcggatcgttgtatattattttatgtataatatgcttgctattattattgctattataattgttattactattatgattgttgttgttgttgttactatcaccactcatcggatttaattgggataatagtaataatgacgatgatgatggtgatattgcattggtacctttaaatctcatcgcagctgccatagtcactgtgttcgatgcaacagttattaatccagttaagaattgcgcgtttcctattgtgttattgttagtggtagtctctctggtatcaatagcgttttcttgtggcatcaattgactattatgatcgttactgttattatttttattgttgttcttattacttataccactattactgacttgacttaatacaggaacagcttcatgacccatagtggctaatttattcttgtgtattataccataataatagtactgtccacatacaaataaatcattcaataagaaatatacagccaataggatctgaaacatcaactggtttgtcaataatgcaccaattaatgatgtgatatcccctagtaaccaacacagtaagaaatatggcgacaggccagccactgtcttgtcatggtatgtttctatgatttgtgggaataatgatataaaagatgcacagaaggatatactaccatttatattggatatgattgaccataatgaatcactaatcatttttttttaactttccattcttctatgagaatatacttactaaccccagtatatatgtgtatgtatgtatttttttatatgaaatctatctgttcttctctcttcttctttttttatcatttttgagtcacaatatatctaaatatataattactcaatctgataagaaaaataaaaataaaaaaaaaatcttcaaagtgatgaaatgaaagaaaagagaaaggaaaaaaatgtatatagattcatttgttcttttattttttattgtcctgttcattgttattagtgtaattaatataagaagaagattatgaaaaaaagaatatatttactcttctcttctttgtttcgttgatgtctgtgctaatctctttctatatatactcatatatacatgttacgtttgtatgtattctttttttagaaactaaagggtatttgctaatccccataatttacacatgaaacgatagtttttgtataataaatctgtagaatcatctccaggaaataataacctgtacttacttgtatcatgaatcaaacttaatgagtcccatccataatgataatctcttgtaattaacagtggtaatgatatcataaatttcaaactttgtgttggagctaaccgagtcttatttgtaaaatctttagtaataacaacaatagtatcaagaatccaaaagaaaagatcaatattatcaattctttccattatatcccaccaatacgtatatttatagtcattcctagtatcccataatttcatgattctaggtgtttctagacaataccattcataatcattttcatatagattattattgttgctgttgttgttgctattattattgttattgttaatattatattgtattatttgtaataaattccatatttgttctattgataatttattcattttaattaaatgatggatgattatttcatcgcctttaattaacccttgattagatatggatttaagttttagtaagaaaaatattgtagataagatcttttgatcatcaattgttaaaatttttttattttcaatcttatcttgaattaaaacttttatctccaacaacttatcatacgggtagctatcattttgaataatcctttcatatttattataaattttatcgaaatcttcaaaatgttctggtttgtctaatagatccatatatatatcataccttaattcatatggtaatgggattttttttataatttgtttaagaaattttatattttgaatccagtttgtcctacccactttactatgactactgctgttattataactgaataatcttccataacttttctcaatgaacaatttataatcgtttagccatttatgtctcaccatctcttctttatatatggtatccatacaatttttcatttcagtcttatatttttcaatctcatgagttgtttttggtggtaaccaaataggtctaccttgattcaaatatttcaatttattcgaagatacacatttcatatcttctaaccccattgaattcaattcttttatttcaattggcaaattttttatattttgatacctatctttgactcgatcatgtgttttttttgaaacttcaatagtatattgatttgatagagtactgaccatatcagatataattttcgactcattaaaagaaggattgattttttgtttgttttcatccttgcatggatattcatttccattattaatacctggtatagttgtcacagtggctaaaacattctttgaattcaaagggttgaaataagggtagtgggtctttggaatattccagagtattgaatcatctatatcattatcgatattgcaagcatacgaatgagccacttctgatcgatcttctagttccttttggttttgatgtttgttctcatatgaatataaatctttgttatatatgtaatttcttaattgtttttgattctgattctttcttaatctatatctctgagatggcgttaaataatggtggttacaacattgatcaggggggattatgttggtggtagtagtatcagtgttagcagtgctaaggttaggggaggttgtagtagaatttgatgctatagattctttcgatagaatagattgatttccttcgatcgaatttaatgatggtacacttgaaacaaacgaacagaaactaggtttatttttaagattccaattgctgttcgatactgaatccttgtgtaataaatgatataaattttcacttggtcttttagtttgatctaaatcgatcttgtaataatgattgatattcttatttgcgtccgggatcatttgttcttggttacgtactttttttacacagaaaatactcttaatagctcagcaaaaaaaaacagtttcttgtgaagttatatgctattaattgaatcagtttgatagttggtaatagctctcctgtgtatctttatttctttgcttatgctttccaagtaagaataacaatagtaatggcagtatgccttcagtggtcttgaaaaggttatacaagaagaaaagttagatttagtcggaagatcttggcattagaaaaacagatatgggaagatacagaaaaagtagttttattatattatccagaatacaaaaaatcacggttgataagagatcatacagatcagataatcactataactttaattaataaatctcgtttgtctatatatagtttgtgtttgtttattcatttattcgacatgaaaaaagatctcatttattgcagggccagtaacttgagtacgttattattatagaagatatcgatggacatttgtctcttttttactttattatactcatcatacgttttccctttcttattcttagtatctagtaatgaaataatataatacgtttctgcacaactaaatctggctccatcacccatttactggttcaaattgctaaattaggaaataagttgacatgaacaaaaaataaaaaggattgtgtccattttccccaaaataaatagacctaattctattgcatttgcacattatgagccgtttggctggcctttggctgggagtagtcacgtgaaagaaagggcgtattttttatataattattttgcttttttgtttgctttattagttagggttttcgtgtaactatattgtattttactaaggttttgtaaataaaacgtaggtctcaaagaatatgtttttcttgtttttctctttttttctctcttgtttttctctttttttctctcttttttttctttttaggtccagctattgtttgattgatggattataatggtgagagctcgagaattatcaatggaaacaaatattgacaatcaatacttacacatacatatatgactatattaactaaaaactgctctgttggaatttacaaatatatgtgtatacattaatgtagtgaatagtcgttatcactacattctaatactgtgatttgttttgattgtaaaattatcaaaattttcttttctttttttaagtgttcattcaaatcagtgtatatctggaatcccaattatataaagtagaaaatttacgggtaatgtcacattatgacaatatggttaagatttatacaatctggtttaagaggctttcatacaacatgcatatattcttttgattctaggactaggatttcatttagatctttcaccaaaagatgcaataatcttgttagcaattctttaagatttattagtattcataatagatcaggaattctacatagatattattctatatcatcagttggtaataagtttaccaattctttattagtttcaaatgaggattataattggattgattttaaagcaaatcttttgagaattctaaacaaaaataaactaaaaactaattccaaactaataaaactgtatgaaactatccaacttcaatatcactcatgctccaaacatgaagctggtaataataatactaatattaacagagatttaaagactatttatttatctaatgcaattcatctttggttctatcaaaatttatctaaggatcaaatatatgatcatattaataacatgattaattggaacattaacttgacttcatctatctattctaaaaggctaattcataaattattgcaatcctctgaattagacattcaattagtcacattagaaaaatacttaattgataattttacactatctgatagcaatgataatgttaataataataaggctgaaacaacaaatgatcactataagttatgtcaaaatgattttattaaaaaatttatatcaatctacgattgggatacaatgattctattgactaataatgtcatcaaaagaggtaactggagatttgtaccatactatttaacagctttaattgaaaaactaaaccaactacaaactaaaaataacaacaaaagttttttaactgaaaataaaagaagattgaacttacaaaggtccttcatcaaatttcttgttgaattaatgactgttttatcgaatttaaataattggaaactagttttaccaatatttaaattaattattgaatctgtgaataatttaacactctcagtaccttcctcttcttctttatcaactacctctgtttctttagcttcaactactattggaaatttggcaatcctaaataaacctttattacagattctaaaattattaagaattaatggtcaaaatgatgaaattttccaaatgatatcatatttaaacaataaatcgattaaagttggaaatgatggttctaaaactttgttgaatacattatttacaagttttcagttccaaaaaagattgttattggaattattaactactctgcgagcattccatgaccctaaattaagtatccaattcttaatagcctctgtgagatcacctaacatggaacaaatattaaatgatttggggctgattggatggatctttaatggagaagtatcgactttggctccacttgaattaaaaatattgacgagtgattcgttaaatcaatttttaaacacaaaccttaaatttaagattgatgatttggctccagtactcactgaattgtatctaacagtattaaaaaagaatagtatgatattatcaaaagagtgtaataaagatgtcctcttaaaactatatcataattatattaataaattgaattcttctagaaagagttattatttttggaaaaatgattctggcgtattgatacaatttttaaaaaatattatctttgagctcaacgaccatcaattagcatatgagatacttttagatttttattctcaaaaattagctaaaacagttagaattgttactagtaaaaataaaaatataactaagacaagtcatcatgatgatttttataaaaggatcccacaatcctatgttaatcataattgtccatctacattattgattcaatcatcttataaatatttgtcaatgagccagatttcaaaattattaaatatcatgcaaataaatcgaacaccattgaatttcaacatctgttgttcaatggttttaaaattaattcatttaaaaagatattctgacgcaagattatggtatgaaaaaatatattcaggaaattttaatcttaatcatttcatattgttgtactatgttattagatttgattggccgatacctaaaaatataaataaatcgataattatggaaattaacagtgtaattaaggaaggtttacccccacaaagacttccttcgagggttcatgatttaaatattaataaaattgtaaatgatcataatagtgaaaaagttggcgaaaatgaggattctaatttagatgatagtttggactcggatattttatttatggatagacaagaatctgatgaggctgttttcaatgagatttcagcttgtttgaataaattaaatgtgaaatatgaataactgaattagcaattttaacctgctgtagaccaacagttaagtaaataaatgaaaccatgtatataacgcaatgtcatgtatatttgcattttaatattcattacaagaactattataaattattgttgcaattttaatggttgaaagtcgatattttatatcacattaattctttacttaaattgcaggttatatttagtaataataatagcagcaatatacaaaatagcatcagatacataacatatttatagaggattagtataatagatttaataaaactatttcataataattatatctaaaaccatcccatgtaacttacgtctgtagcagccaaatttcttggattaacggctaatgcaatcagatccaagacaacttgggttgttactgtcggagtagagcttaaatgtccaagttgtgctactctctttattaataagtcaacattagtttgtaccataaccctcaattgtggattttcaataattggacggtgtaagttactataccatgaaattatttcatccctgataaataaagtcagataagtgtttaattcgttctctggttcaagcaatgcccttgctattgtaaatagatcaatcgagaatatgccctctaatgcggaatcaccaatcaatttttgaatgtttggtgttagtctaaatggtactggttcgttattatggaaaattggagcgtctggtgggaggttgatttcagcatttctcagtaatggtttaactctctcaaatggatacctcgatggtagcatctccaatgtaaatacatcacctgattttttatcgacatgaatcttacttggtgtacgattattaatcattgtcatatatgacaaaagtgtaaatgagccatatttagatgcgaagtttttacggaataaccagaagtcctcgaattgattgtataagttagtgaagtaattcttcagcattgaggaaggaatgtatagagattgaatggaattaaaaatctcaattttcactaatgttatatcgggtgttggcaatgatttatcgtaagcattgtttaattctttgaaaataaagtcttgaatattatcaggatcaatattcatcttagaacaagcctcgtcataaatcttgtgaagtgtcgtgaaagatgaactatcattcattaaacgaatttgaggagataatggtacagcaattggaatgctaaattggatattacgtcttctagcttcaacgttcttagataatatttcattcaataaccggtatagttggaacattctttcttctcttcttgagtgtctggcagcaggagattggattgaaaattcgtggatactaccatcgtggccacgaatcttaataactctgtgtgacgcatgagtatcacgtataaatttaatgtcaggtaaaaatctagcaattttgataaaatgatggttgttgttgtgatttaacaaatactgaccaggaatttcaatttcttcaaacttttggtggtggaaattgcttaaatttgggcaaatacgttcaaggtactcaacttgaggagctctgtcaagtttacacttcaatctttttctccaataacgtaatcgttttaaataagcttcaaagtctggtttgctatcgataaaatcagcattaaatttgggtctaatatggggatctaataatgtttcagaaagtctcattaaatttgtttctgtattgcttggaagctttgaatgttctcttggaagtggtaaacgattataattgaatgtcccatctattaacaaaacatttattagtctaaataagtcttcatcagtagttgttttaaatctttcatttatttgagcaactaaagattctaaagaaagagcaagtaatggatatgcagtttttaatatgttactcaattcttgaaggtattcccaaggttggcgggtgtcttcgttatgcgatgtaattaaattacttcctttatctgcaagaacagccatggttctacgttgaatgactgcgaaatcttctcttgtagttctaagttgaaaatgtaaggcttgtgggtaggtctttgcaatacggattagaatctgtctaaccatattagcttctttgtgagataatgatgtaagtagttgtggaataaatgatatccaataccataccggtatctcacctctgaacgaatcaaaggccttggataaagagcctgcagcgtcgtccatgcttattaaccataaaatacggcataataaaattcttgttttagaattcttgtaaagaccagcagcttgaagataacaactaattgcattactagcatagctaatattgttgggctcttcagataaacggcgatcattgaagaagccccactcagcccacgctttagctaagttcaaatcaatttgaactgcagtagcaaaagcctgattcgcctcatcatatgcttttaattttgacaagaacatacctttaagtgtgaaaaattctgctttttgactagtaccaaaataaaccagattagtattactaataacatcaagacctgtagtcaattcattcatattttcgtaatggcattttgcctgttcacgtaatttcaaaaatgcctcctgaatttcaatatttggtagggtgtatattcttgcaagttgatttatgcatacatctggcatattatgttttctagcaacatgtgcaaaacgattgataatccaggcaagttcgtgatagcccctataggcatgtgtgttgatggcattgctgctaccattttgttgtaatgtagaaattaatggaagataggcattgttaattacttggaatgtatgttgcctccatgtaactaaatcattccacaaatcaatttcatcccaaacattgggtaatctatctctccaggccagaaatattctttttacttcttgagccttagaatcaatgttctgagcagtagtagtatggaggtttgtaaaaacatgtgtagcttcaagaaattctaagtattgttgaaatccatgtagaagccatttgtgggcagatgtatatctttgtggtaaggatacccatttgtacaaactcaattgaattccttcgtcacataatcttctaatctcttggtctccttttccggtgtctgcaaagttttgaagagccaaaaaggtttcaaacatctgtcttcttggtgttggaacatccataacacttttcacagattgttctagtgcttctctatcagcattccaatcagccactctccaaccacactccaataataaatcggtgaatccttcatgcttggctaattctgtcaaaatatcccattgttgaagcttttctgcacaaagaatccaattatcttcccaaagagcatattcagattcagaatagggcaatgcaccgcttcgagcctttacctgagcaacttcataaagttgttgagctttgtcccataagccaacttgttcataagataaagcaatattggtttcattgaatttggcacgtcttctccataaaccataaaatatgtcatcttcttgcaagttacggtataattctaacaaggcatcttcattagcttctattattttgacattatctatagatggattctcttgcatagattctaggagattgatagattggtaccatgagttgtaggatatagctaagtattttaagaggtgtggtggaatttctaagctatctattttacttattgattcaagtagcatagttataacgttgaatcttgtatttgtctgtcttgaatgatatggttttgataaaagagtaatcaaagaacgcacaaatccatacttttcacttcttggtatgcactgatacacttgaacaaaaaggttagaccaggtcttttgaatagcttttggactttgatagaatatttcgattaatggttctaaaatatcccatgccttaattgtgcacaatttctccatatgttttttgtgatcattaatgaaattctccaaaggctctaaattatcatttattttgatatcactattttttggtaagtactcatgaagcatggtagaaaggaagaatgtattattgtgacgtggttctaatatatgatctttatcaaatgaaccatataacagttgaatgccttgattaagccatggataatcagcaataaattcccaattttgatcgcgaataatataatataaacgttctttaatattttcctccagactattttgtagaattgacataaacttttttctaatctgaggatcctgtgttttggatcctactaggaatggttgttccattcttaccgtgatctctgtattggtaaattttttctgatcaaatagttctagaacaatttcatagaacattttggaaagtgatggttcacctcttatttcaaatgctaacattttcgtaagaattgctgctttttctttcactgtaggaaaaatttcgtcactaaacacccatactcttgaaatgtcgattatctttcttaaaaatttttggtccattgaacgatcaattaataatgcgattgtcgataagaatggacgtcttgaatctcccaaagcagatattttggttgagagaaggcatagtaatttttcaagtaaagtggtagttatttttgcctcctctaatgcaatagcatcctttggttgagaagtactcaagtgatccttacaaagtttattaaaacttttcataataagaggtaataaggaatcaatggattctgagaagttgacaaacagagtccatactaaagtgacaccagctgggatagaagttgttccttgtagatcagtgcttattgtctcaatcaagttcttaacaaaagtatttaatggtttctcctctggtgtggctatactactttcatgaagtttaatggactttaagatgatgttcaatagtttctgtaatgattcttggatgtcatgatgattaattttgatcaatttttctaaaagagattcagtaatggccaaattttccatgatccattgagactgttgactatggataaatatatacaaaacatctatggtattgatgcagcaatacacagtattttcagatactaagtcgacgtttgcaaaaaatcgttcaaaatatgataattttatattaacgtctgaccaatgttttggcgataataactgagagagaatgttcaatgcttttattccatgctcgctttcacttgccctatggtcggtcgcacagatataacgaatcaaaaatgaaatacaaagttctctttggtgaattggaatagtatattggcctttttgagcggttttttcactaaattctgcattagacatttcaatatcaccatctgtatcgactttgtttgatttgctttcttgtaaggccatttcttcccaggttaaaataagtgatgccagatcgatagctagtgcatgcatatcagcatttgcattgtttacaaacgtgattttattcatatgattgataatgttggaaacaaatagatgtctagaatcaaagagtaaacgactatgatttaccatgaactgatataatgtgttattattttgacttgaattattctcaaatagaacacgtttaatccaatcaatccattccttaggatatttggtttttttcatttctctatttatgacaggggcaatagagtttagagattgtgtaattaaataacgaccctcgctgttcgaatttctcattaaggcaacaagaacttgtgtaatgatattagtagggaaatcgaatttagatatacataaggaaataacataataggcagattgcttaattagaatatcttccgattttaacaagttccaaacaaacttaataatatcttttctaagatcagtaaaaatagtaggagcccactttataaaagaagctgtaatttgaagtaggaaaaatctataaaaatctaatttatccgaggaaattgtaaggatgctagaatcttttggtttccagagatcatcacgaatcatagttaaccagtccacagaatttttgtcatcatcacatagcaatcgtaaggaaccattcatcacaccctggtaaactaaaatattattaacaatattttttgcaatatatttctggatatcattattttttgactttaccatatgactaatggcttttgttaaaaattgattacattcattattttttgttgaaagcatgtatttgtcaaagatgaattgaagaactgaatgaggaactttattacttgttaaaatacagaaatcaatgaaactcaatagcaaggtgtcttgttcttcatgttgataggaaatagtctttaaatataatggttgaaattttgaaatagcctgttctaattgtaattcgtcaacaaaaaaggagttggaagttatagtgtgataagttgcatttaacatatcttttaattgaaacaccatattactttgactctttaaccagtcctcaccttttatcttggccatagtgtcaaataaatcaactatgttagcaaagaagctaactgccctaatttggttagtggacaaattggtcatataatatgaatagaagttaggaatttcggcttcaaacgattctgcaagttcttttgcttcggggtactggatgattttgcacataaatattacgagctgtcttaacgccatattctttttgaagtattctgtgacagaatggtggaatctattcaaatatttagcaagaggaagacggaatggtgaatctaattgaattcttaattttttttcaaggagcataacttttaataataaatcatttaagaacatgtcggccttaggtggaagtaagtggaatatgttgataatacctaaaataatttctgttgggagttgtttgttgatatctttgccaaatatactatctaagacctcaatacgacaccatgcagccaaatgatcaagaagctttctacctatttcgactttgaaatatgcgattaataattcaagtagcttagacaatgcgtatagtccagatacagttaatttttgatggtcagataaattcattaacattgactttaaaccattttgtagtaattccttaggtagtttagaattttcttctagagcactcctcaatgcttcgtatgtagtatcaataatttcagtcgatggttttagcatggtcttaaaaaatacagccagcacacgaattctgaggttacctgattgagccatagcaaactctggcttttttagagccaatgtaagtagttttatacatgcaattcttaattgaacaagttgttcagatgtttgatgttcagttgctctttgaattgttgacaatgattcatcatctgcatctgctaaaacaacaacttcttgaagcaatctgaaaagctcttcattaaatgttaaaaaggtatcaggtaatcctaaacaataagttatagcatcaatattaccaatttgcatagtaaaagaaagtgcacgaagtggctttgcaaatattggtgagagtaaaaatttttttgacctgtctattaactttacaacaggaatgtttgtcacctcatttataactgttaggcatttttgacatgcatttcttacgctggtttgtgagttgcttaatccgatacatatatcagttatagtatgatgaagaagctttgaatccaaatctgtttctgatactcctttaagagtaattttaagaacttcaattaatagtctctcggcatcttctgttatttgggtagaaacaccaatttgtgtatcttttaaaacaaataaaaaggcattaaccagatctggttgggcctttccaaggaaatcaacagatatcttaatgtcgttgatgagggttttgatacctagaatacctgcctttttatcatagaatgcctctttataacaattatgcataaattgctttattagctcgtatactagtgagtattcaaaaacatactctttgccacatattaattcagattgtttgtatattctattgattatgcatattgcacttttttgcacatctggaatgtgactggctaatgatgaagaaacagcatgaatcaaagtagtgctatctaatgaaaaatcaggctgttgtatatctaggttaaacaaattcattaagtttctttttcttaatgctacattgctaacatacaataaacaaaaatgatcagttatgtgatttaacaattgagttgcttctccttctatttctttgatagaagttgctataaacatcgcctctaatagttttagtaaaagtttctcttgatatgaatattcatttttaggtctcgattgtcctaactcaaaattttcctccacatcatatttatccaaagtctgagctttaaaaacttttttggttgattctgcataatcttttggaaattcgatagaggattttaaaaaaagcatcaaaatttttgaaagatagttaaaagaactaattttgtaactgacatctgctttgtaactaatgataatatccaaggctgactctacaccagttgtcaaagaaagttcgaattcatttggcattcctttagccttgaaataagcattaagatcataattcaattcatctttaatttctaaatcattagcgggcttaaggtattttctatttctaccgccaagtttccctaaaattttaacaactgtatgacttgtagtatgattaaatggctgaggctgtaataacttaaatagggattttaagacatcatcaacgactggttcaataataggatcaaagtattctgccgttaagttgtcaatacataattctagtgttcttaacccttgtgaaattagttcagggtatccttgtaaagcataaactaatggtttcattaagtatggaagatacggtgccaaaacactaagtcgtacaggtactgttatacaaagttcaacatataattctcgttcatgaggtaattttgctgttaatatcatatcatttaatgtttgaagtaaaagttgaagaatggttttaatagatctataaagattctcaaatcttccaccaccaatacttctaaacaatgttctaattagataatagtatactaatggctcctctgtttgtgttgcatactttatagaatttaagattaggtcgtttagataaggcaataaaaccaattcatttgtgtttggaaatagattaactgacataaatgacaatttaaataatcgaattaatacattagattcattgaaatccacatttcccaaatcttttaatttggtatttaaaaatcttaataatatactaaagaaattagctgatgtaatttcagtagtaaggaatgactgtgcaacatgtaacagtgcagaatcttctagcattctttcataaataaattccatttcagtttctataatttcattgaatgttgtactatctaattggataaatataaaagctaggtattccattaattctttaccatcctttgtcgcagtgacaggtaggcttggaacagtgatatcaaaatgttttttcgtgatctgttgtggtgggttagggtttgcaaaaaatttcagcccaataatacattcatgaaaaagttctctaaacataattacttcttcataagagaagactctagatatggcagtccatagtttagtatgattttgtgtataatcattgggtggtggattaaatactttcaaatcatgaataatagttttgagaaaggacattaaggtacgataaagatagaatgcatctttgatggggtccgtattcggattttggctgattttaatagaattgaaatatcgaagatcaaatatatcatcaattttttgtttattttgactgtcattttctacttttaagtcatctgtcatttttatatcaccttcagagtcggcttctgaaacatgggataactggtgtgaaggaagatcattttcattagaatttttcaccttgaatacttttttcatgtaaatgtctatacctatatcctctatttctaccaaactcttaatttctttggaattggcatctcgtgtttgaatgtattttttgtggcgtttcattatgttatcatattgtttatttagaatcttgaatcttgtcatgtaggcattaataataatcataagcattttcttagctctgggtgcatcttgaggattttctcttcccaattttaaaattctttccacaaggtttagtaataattttgcactcatgatttgaacagtaaaggctaatgattcatctagcaggtagcgggtatacatttttatggtcttttctatatcatctaatcgaagctccattctaacattatggataaaatctgctacggtactatatgccaatggtcttagtatctcatatgtagtaaaacctttcccaattaaaacatcttcatcaaacaaataatgaagttttgataagaaaaacattttataatttgtggagagaatgtgtctagtagcatgtaaaagttctttcctggcagatgcaagttctgatggacagtcctgtaataatctaatgattaaatcaggaacaaattctgcatgaccttgtaaaaactcagtggcatatcctctaataaatacatacgctaaaaaggatgttgctttaatttgagctaaaatgaattcacaataaacttctctattggtgatcccaggtgctacatcagtaaacttttctcctctagcttcagcttcttgtcttgccaatctttgtttgtcaacttcaagtttaagtaattccaaaactaacggagtaaactcaagtagagaagtccttgttagttgtttataggaagaatatagtgttaccattgtaattgggcattcagataagaccttaaaagaatgcatagtacttcttaatgaaccagcagtaacatttgctgtataactgttatcggtttcagtatctttctttacagtcaaattttcattgtctgccatagagaaatcatcttttatagtggttagttcattagagaactcactgttaaaagagtgtatattttcatctaataaattttgtgacaagggatcttttaatggaacaatgtcattggaaagaagatcgttattttgatcgaattccttattaactaactcacgagaatttttataacattggataattatgcatataaattgttcaactttttcttgtaatatatttttaaatgatttgaatagaagagttaagatcctcatacaaataataccattctcttcattttccttgggtaatatatttaataagcaatccaaaacattattaactagttcctctgataattgattactaaaacatgagtttaataattctagaatattgtgtctcagtttatgttcgttagaattttcatcaaaggaaattgtgatttcattaagaccagaaacgagggaggggactattttgtttatacacaattcgaaatcattgccgaattttccatccaataaatcttgaatttcagaaagaatagtaaatttgtctgtgaggagtgtggatttgtcgccaaacttggttaccagattgtctagttgctcaacaaatgacatgggaaattcctatatacttttctagaagaagtatgtgttttctttgttttttctgacaactaaatagcaaatatgattgtaatatactaaatgaatatttcaagttatgaagaaaatataatctggttaactcaaccttatagttttcttatggaaaagaaaaataaataaataaataaataaataacagtgataaagggcaaaacttgcacacctttaataaaattttgtttagttgatcgactatcttataattggttatattgtagtgttacaattggtcgttgaatgtcaatatagacagactttaacactgttaaatacagttctttttactatattgtaaaagaaatgaggaaaagaagaaatatttcatttgccatgtcaaaaaaaaaactaaagacaaaaaacaggattgactatgaaagtaaggaggtcacgtgccaaagttcctaattaggaaactgtgtcttatggttgaagagaagcaataaaacaaagagtaaaatgaaaaattacataatgatttctttgatgagatattatcattatttgcagtattgtgacattaacaaaagacattatatatatatatatatatatatgtatatataatttatgtatatttatgagtatataatagcattaataaaagagattacagttatatatatggaaaaacaagggaaatatgtttaacaaatgctgtatttgtgtccacaataaatagtagttgcattgtaaattaggtcgtgttattatttcatatatgttcgctattatcctcttttaagtgtatttgatatatatatatatatgtgtatgtgtgtgtgaatatacctgacattgttacggattaaatgtggtagcagtcttaatcaaactttttttttcaataggatgatagattttaaaatattatttaaatattaatacatctatatttggaaataaggtgagatagtaatatctaaatgttgttgcagtctatatcaatcaacattttgaatttttaacatagttcatgaaacaaaatatgaatcatgggtatattccattaatataccttcaacaaacttttaagttgacaattacgttctcgttttctcttatatggataaactacgtatctacctttgtttttatttgcttataccactctttgggtacgatatagtttatctagcatatactagagaataatgactatgaatcatttattatattttatattctaaaagtgtacagctcttgtaacatatgaaatctggaggtcactataaacgatcatgtgaactcctcggtcgacgatgacgctcttgttttcttgtttatcttgtttatataactatgtttttctgtatatctgtatatagtagtttactctttatgtagagtatagtctatatgtcatatatagacaacaaaatcaagctatatctgtctattttaatgtctagaagagtatatccctcgtaatcgggttgtcatctattacagctctcgtaatagggcttcttctgctataatgtcacataaaaaaagtagatcataatgtacactttacgttatataatgcatgcaaaaatagatgctctgggggaggttcgaactctcgaccttcagattatgagactgacgctcttcctactgagctaccaaagcgtacaacatgctagctgttgtagtatggtatggtgaagttctttgtgtattccagggaagcgcaaataatattaatagtaattcaaataatcgagacagtaatcaactatagtcgatagtataattactaaaacggtcttatatattaagcggcttatatcgagctaatgtacttattcgaagttacttgacttgttacttgcttgttgttctctttttttcatatataatatataaattatttacaagaaacggttatggaagatgatcttttatctccagaaaacgttgtccttttatatgttttctggagctcgatcgattattcaggttactacattaatgacttgactgattcaaccctaaaatttattatattaatttaggtgcactactggattagaactgcatcccaattctctaatcatggtgattagtaatacacgtgggacttaataaaacaataggtaaattctagatttgccaagatcttatgtaatccaatctttttattatgcagcatctaatgttgtagcacatgtatggcttactaatacactaattggttctagattcattcaggatcttatgtaatcttgatggttataactattttatttcacaacactagctattgtagaatagaataataattaccataattagagaattgaggtgcagttctaatccactagtgcacctaaattaatgtaataaattttagggtttgaatcagtcaagtcattaatgtactaatctgaataatcgatcgagctccagaaaatacataaaaggacaacgttttctggagataaaaaatcatcttccatgaccgttttttgtaaataatctatatattgtataaaaacataaatagaaaaaacaagcaataatccttaattctccaatatataacgttcttatatatttgctattgcccttactattcgttcaatagtcctgttaaagaattagtcctaagtccaaactataacattagctgttgtggaatagaatagttattaccactaagtttataaacgattctgaatgaatttagaactatctattgttttaatatgtcgtacacttattataataaatattagggtttggatcactaagtctattaatgtatcaattactcaacatgatatattaatggattggtagctcatatctttattgttagttataataatataatggaacttcatagaacatttggaataatagtttatggtggtgcagtagtagaggtatgtgaacatgttgcacttaaagcataataggtaattctagattcagctagaatcttaggtaatctcggtgacgttggcttctttattattgaatacagggacgtgcagattgatgtgatcagataactcaaatatagcacattcttatctagatggttgaagatttatttttgttggaaaatgagagtccattatggtcatcttcttaaaaattatttttaatttaggttttttgtatattgtgtgacgtatgaatgtaccataaatataagtataaaattttagttttttgcatcgaatgtttttttcaaagattcaaaaatattgaaaaatttttaaaagacttgcttgaagaagtaaaagaagttttttatgaaaaataatatatgatcggtatatatgtatttaaacataaagataaaataaatctttgttggaatttggagccttcagagtccatggtaataatatccatcattaagatatagatgcttattgtgttttgtactaaatacatgtatatacttattatatagtgtataatgtctttctgatagtatggtacatctgtacaccacataatatatagaaaaactaattaaaaataattcttatggaaatgacaataataaactctcattttccaacaatcttcataacttaattacttctactattaccatagacactaagtgccctaacttccaacatggtagtgtcgccgttattgatgataaagatattgggaacaacaaaatcatcaacgatcaaacgaaagatttgaaaaaggaagttgtacaagtcatattgaatatagatttgactgtaaatgaagagacacaaaagactaaaaagttaggggaattggtcgaagccctacagaagatttcaaatactggaaaagacacagataatgttcacagagaaaagaagatagatgttgaacaaaaggtagatcttattccaacgaatcaagaaacaaacacttatgaaagccatatacctttgtctagataatatgaatatggtttttattacacctttagaaacttaaatagatatgctgttaagtattgctctgaaaattacaaccacaaatttaacatgaaattatctaaagttgaagaaattcctatgtgattcaaaccattgtctagctatatcaaagcatggaattttgataatgtaacacaagtaataggtgttattaaaatagataaagatgaagaggaaatgatcaaaaacattgtgattaattctatggccggtgatatggaaaattatgaatttgatgaaaaatcgcgtattgaaactattttgtttatcaaacaattactaagtgaaaaatttcccagaagcgttaaggacagaatgtgaagataattggttgttgctgagttccatactgaaccagaaaggatcactaaagaatttatatatattttcaaaccaaaaaagcagagccaggttagaggtaattgttgtcaacatatattgcaattatagtacggttatctttagaaacaaatatgtcaggtaagtaaataatattacattgaattagtcaatttataaaacctttttagatttcattccttcttcttaagattaaatagatagatcaatcagattttagcaaatacaaatccacatcaaaatgtaacatataaactgtttatgtatcagtgaatgtacacaaaacaatttgataaatatttcttatcggtagaagagatctgctagatatgaatatatatctaaagtcaataattttttcatatcatgtttctatccttgtgggttttgaatatatcagcatctttctattgtaaatatagaagaagatcaacgaattttaatacaatttttatagcataaaaataataatgataatgacaatgacaatataattgaagctgtttaatacatatcaaatgaatacaggcgtttatttgcaacagtcacatacggaaatgtaatgaaatttaaagcacttagtgctcattgtaatagtaaacgtcattaagtcacggaggcctgttttttttttgtatcaagtaaatgtatacacttatatgtactttaccacttatttttttaactcttttaaaattttttttcatttcttcaaatcttcggaagatccattcgttgaaaaaaaaaataaaatattcttccattaaaaaaatagtttccctgagaagagaatagcaataagactttcattcttattacgaaatgagagtctaatatttaatatctccaatttcattttcttgttgttagttttaattaaaagaaatcgtaacaaattaagacttgaaacgtatgtttcaatatttttatgactgctgattacttctatagacaattttgactacataggcactgtgttttctaactgtaaaatcaactttgtttctggtattttatcttttagtaatttttatggagtttgttttgtctttaaagaactcctttaagtgtgtatttttctatagttcttagttcaataactaatattatatgtttaacgtcttctcgtataacactaagtaaatatttttttaattcttttcttcttcttgttgtaaatcttccagttgtacgtccccaaccttggtttggaccctagttacatatgcactgataatatctcgtccatttttttttcatttaaactgtcacttattgtggaatcaagtaatatgaaataagtagtgtacattatttgtccttccgtcatcataaaaaaatactagttaaattctttcatatccatggaaagtcttatggctcatttacctggaacttttacgttactgtatttacaatcctaaatcgtagctgaaatatcaaatgatataaaaagattttaatataatttccaccttacgatcagatatattcattagtgataatttactcacgttgttgttgtatgtgtactttcatacattcataaaagctttatctgcacaggtttagaacctactttgtgttaacatcatattctttgttcattaatgatttatatttttttcccaagatagtatctatttctcgatataatttctccgccaaaaaaatagttgcatttcatttagaagagtaatattttggaatatcaatggtataatttctgcctattctgattggtaatgtttcttctccaagtattttaatcagatccttatcgtcatttatacacaatcattcagatattcttatcaacagtgaaaaacctagaaacaagcttttgttatggcctagctatattttagtagttatatcaataactatctcatcatacaatcaatctctgtaataacatatgtctttttgtttatgcatattgtccaaggagaacccaaataaagcccaaagagttgtcaaaatattctttaagcctttttttttatttgactttcggaccttaaagagaaaaaaattaaaagaaatctaaaaataaaaatacacaaaaaatggctgaaataatctcgagcctcacaatcttatataataagtagaagcagatatttgttgtgggagggaggatgataacaagtaaactcatcagttaacttttagttgaacgtggtataacaacaatcgaatgttacgttaggacactaaggtattagagacattagcatatcattttctgttttttttatatacaaatataaagtaacagctcgagatggtctctccttggattctgatacttcaacttatctatggtctccattggagaattgtttttgcaacgtcaacctcaataagcaataataattctacatctataaaaaagtatggccttccacaactcacagttggatatatgcatactggtgattattatataaacgttacacttggcacaccacctcaaaaacaacgattgttgatagatacatccagtccatacacttggttcttgtcaggagtattggatgcacaatgtaacaagttaaatagtggctgtcttaatgatggattatattatccaggaggatccacatcttcaatcaagatagatgaatttacatctctggagttcgatgataatcaggatggtggacaaaatttcaatggaacaatattcaaagataattggaattttactgatatagagatggtttatattgaaaatatcaataaatcaaaaggtatgacaccaattagttcaaacgtagttttgacaaataattttatagaattaaagaattcctcattagcctgtattgaggatacagatgatgatattggggccttgggtttaggtggtaatgtacatttacagcgtatacaatcacggaattcagccttaaataattctttaatgtttttagaaaaatttacatctgatggtattattcctactcaatcatattcgttatggttagggaatagaacttataattattccagtggtcatttggtgcctttacctaatgattatgaaggtgttttattattgggtggtgttgatgcctccttatacgaaggttcattttatcaatttaatatgataccttatgttggttcatattcaaatacttctactgttgggttgccaatcttgccaatgggacctatatatatgagtgatcgtaatggacgtaaagtaaatgtgacatcagagcagtatttgagtccagtccttttagattctacaactagtggtttatatcttcccccttcagctattattcaaattgccattcagttagaagctacttatgtgaaatctttaggtagatggttagttccatgttctatttctaaaacagatgctcatttagattttacctttgatggattagtagttgaagtaccacttctagatctattatcaacaactatcgatcctgaaacatctatgaaaatgcatttttcagatggcagtacagcatgttcattaaagctattttctgatattgatattggatttagtatcttaggtagatcatttatcagaaattcatatattgctgttgatatggaaaattattccgtggctattgcaaaggcaaaaactttaaaaaatatcattttggatacaactatttcaacaagtcaaggagtggcgacaaattctgcttctgcattggtatctaaatctagtgctgctaaaaacttatcgattcaagcaattacttctgactgcattccatatgctacttgtcgtagtgcaataactagaacgcatttgtccatacatgtgactactacagcagctgatgttccagctcagtttactggcattgttaattccaatggtttgatatcaggtgcgggtagatccttttatgatacatctagaacttcaacaaccaagaagagcacctctccctacagttttttctctctagatggatctggtttggaatcactgatcaatgccactggtacagcatttgttaattatggtcaaagaagggccctaccgatactcattgatccacaaaacaataaatcagtatggtcaaatatggatctatcaacatggttcagtatcatagccacatcaacaatatttatgttgacgttatggttatagatgaataagaacatatatacatatacatatatatatatataatcatgtacaattatttgtttacatctattctagtatgtataaagcttttattattgtattaaagcttatcgagtgcatggaacatctttataatctcatgaatcagtaataataaacaacattcctttcatccacttttccctctccctctttttcaagcttgaatactactgaactactccaacataatacacttacaactaagacacacactgtagttctgttattactagtacaataattattataactgttatactggcatggttatatatacactagtcgtctctcgtgactaaaaaaactgttatataatcgctttaagctttctctcctcaaaacttctggaagaaaagatgtgaagaaatgaaaaatagagaaaagtaagcaaaattttgctgaggagagttgagtgatcagaaggctgtattgtcccaacttgactgtaaaaaccaagagtaaaaggaaaaggaagaagaaggcgtgtttttcttatttaaatattaatataaagatacaactgtgaatacaggttattcggatttaatttagtcaaatacatatatttatatatagataggtatagacattaaggcctgattaagaatggaatatcaacaaacacccggatcagcaaggccattttcttccacaaatccttttaggactgatgaagttacttcaaatgttcaaccaggctatccgaataatagtaatcggaacccatatgatactccacagataggtcaaaataaggtggaaacaacttcaatgtacaataactctaatggttcggatacatatgcagctcgtcctgttatgaccaaacgaaattctactaacccattccttgacgatgcagctattaccccagaacattctgggttattttcaccacaacagtatgaatcagatagtagagcacaattttctccaccacagtataaggaccgaccacagcatattactgctaaggaggaaaaagaacagctaagaagaaggtatatggagcaaagtgacggatcagaattaaaaaatagttttgcaaatgtagatcgtatagagatcaattcacagccaccaccgccatcctatgaggagagtacagattttaattctaataataaatatccaagagaaaaacaagcactaggtcaggctagtagaaatcattctaattctattccatccatacagcattcatataataataataatcattatggaggtaatcgaccatctgaaatgcttccacaacgtcatcacagcaccattgaaagaacgcaaagacatcaacatcataattcaagcaggagccatggaagttcgacaagttctagaaataaaaaggataaaaggaaaagtgtggctattgtatctaaaaatgtggacacaatagataaattggatgttactggactatttggtggatcgttccatcacgatggtccatttgatgcatgtgctccacatagaaataaaaataataaatctgcaccagtacttgcgtttcctgtagatggtccaaatagtactattggtggtgctattacaaagaaatctgctatgagtgaagtatttggcgtagatgatattgatgatgattcgtttttatattcctcaaaaaattcgtcgtcaaaagatgctttaagaagttctgcttcaaagtatatacagaatatggacactaaaaacaggacccaacaagttcatggggtggaaacttacggtttaggttcaagcacatttttggatggtgcaccagctgtaggtactgtttctcataatttgggcgtacaaaggggtaagacaatatcttatagatcttctaattcttctagtctaagaaataattatgataatattgacaataatgggtttgtaaacaatactaataatatccggagaaatttgagcaccaatagtcgtccagtggtaaatagatataatagttttaatagtgatgatagacaattaagcaaagttgacgtaagaaatccaatggtaacacgtagtgctggttcgagtcaagtagaatttaggggagattttgatagaaagaaaggccaagaagaagatgaagatgatatatatttaagtgttggtagtggaaatggtgaaaaaggtagtgttggttttaatgatgtatctagaactgccactaagaaggcatcagctggtagcaaattattgaaaagggtaaagagtttgaaggttagtagtagaaaatattgattagatctacgtctatccatatggtaaggtaaatataaatatgtacacacatattatataatataaaaacctaaaataagaaattgaaaaaaaaagatataagtcattctttttataatttattcagaggtatatttgatgggctaacttgttttttagaattaacttatttttaatatatattttgttattatgtacatgataaattttgatttatatatagatgtgtgtgtatgttcattatatatttttttttcttattgctcttcaatcatattttagttcatatttttgaggaagtctactctctacaatactccaatcaattgaatcccatattctgtttaaatattcttttttaccaaacacaccataatcatataaccaaaactttggagatgcgtcaattgctaacaatggagcataagtggtatcattaaaagcgatttttttaatttcctccgatgataaaatttcgttataataagaagatgcagactttgagacatttgattgtgaatttgaatcgttattttgtgttttctctttttccaatcttttatactctttctccaaattattaattagattagatttattcataataaatggtgatcctgcgttataggtgttaaacacaaacagcttatcgtatttaatgtcatcaaccatctgattattcattgtttggatctttggtttatatattctcgctactagccatgtaaaaccatcaccggagatggccatattagagttaagtaataaagttctaaattgaaccatggaactaaacgaggattcaatagcgttttgtaatagggtatgcgcagtaaatctaggttcgttattaaaatctaaagataaatcaggtgtttctaatagagaaaattttgttggtttttcctttaatagaggggcgtctccattactagtactactgtcgttattagtatcttttagagaagatatagaaaactcgagattatataataaggaggcataatttgcaatatttctttttgaaggagacataccacattcagttattaattcttcgacacttttgttttctaaaagttcattccctttaatggattcattgagcatctttgagtaatagttaatacggtcaatacatccacgttgccaaccttctacggatactaacccagggattggttttttattaaacaatcgttccaaggatctagttgtgactgatctggatattattctattagtcaagctttttaatgatgacctaaacatatcactgtatgctatatccgtaaaatgattcttctctcctaatatattcgttctcttgggctaattaaacaataatatattttaaagcttaactgcacgtatcgagtggtaaaaagttatataaaagcatgcgcataatgatttactccaacctatttacttgtagccctgtatatccctctaatcctctccattctctcatttccctttcatttggtagtttcttttttcctgatctttttttatttgcagatctccattgataaaatagtaaaatatcacgtgacacggatatgtcccatttataatctattatactatccctaaagaagtgtattgaataaagtctattagtaaactgaatagtatgtaataaagtatacatgtatcagatatattgatggtctatattggttatacaagtacatgtatttatatagatatagatatgaatatatatgacatactagtgccgtgacataatatttaataaaagcattcctgaaattataaaaagtaaaaggagggtattgaaaatattactagcaaaaaatttttaattgcaaaaatataaattagggctatataggattttctctctatttttcctgtttttgtcaagttgttgaagatcaagacaccatacttaaattcaaagccattttttcttttttttttggtggtgacaaaagccgtaaattttttttttcttttgtttgtttattttttactaattactaaacagaagagttgagatgattaatatgttgattggctaagtgataaatagttaagtctacctattgtagtaaaaattttcatgaggtggctaccctagatctcaaagtacattcagctataacagatatcatagtcatatttctaatcctggtggaagcttggtttgtgtgtatataagctttgaaacaaatattaaaaaaatataaagcagtagataaaaataagaataataataataaaccaagataatgttaaagtggattcaaggtggtatttctgctgtaactggtattgcagaaccagaatacggaaaagaatatatacattctgtgacagaaagattggaggggaaacagccttatagagaagctactagaaaggatttttgttggaaggctccagatttcactaacgtggaaactgctacattttattttagcgattcaaagagtggcatcacagggtttgcacaaattattcattcaaatgtgcttggtatgcgtactgctgcacaatttactttcagaatattcaatgcgttggatccagagagtttgaatatttggacatctacaaaattagaaaattttagaatcgatggcccaaatttttacgctgatgatttatctattgagttatcagacgatgataatacttaccattttgtgtctaatgtctgtgaattgtctaaagttgatttatattttactagatgtacacctggtgtgaaagctggtgatgatccaaccacatattatggtgagaatatagatgaaccatggggtacaatgagtcatcatttctggccaagaaatctggttcatggtaccatcaatttgaaaatagaagtaccacaagatgaagaggatgaggagaaaagtaatagtgatgaaaatgaagatggtgaagaagaaggagaagaagaaggtgaagaagaaggagaagaagaaagggaagaagaaggggaagaggaggaagaggaggaagaggaagaagaagaagaggaagatgattctgaggatgaagattctagcgactatgattacgatagtgattttgaagaaattgaaaaagtgtacagagatgaagctattgaattttcggaagatacaccatgttatggtatgtttgtaatggcatttcaaggtatgaaaccacatcatgccgccaaagcttggaactttgcagttacacattctgatgagaactcagttgtcttaatggaatttattactcctaagtcatatggaaacacaaaagtatctatcggtattatcacagataaagactccattctttctgtaactattaataacgattatcaacatttaaattctgaaattgatgaagttggttggaatgttccaaaaaatatcaaggtaacattcaatgggttttcttctagattaacagatgaccaaattacagatgagaattcattagctgaaaaagataaactaattgcagtccttgaaggtccattaactaatttagtagaaagagttgatgttatgggtgaaattccaggttttgttaagaatattgtttctggtgtggctggtactaagccttttatttatcagtacgccgaccaaaactttacattacaaatcggtgataatgaaaagaaaaaatgttttggttgggctgaagttacttttatctctaaatctgatacagtaacagaagaatcatacaacgaaaactagaacaaaataaatatagttattgtttttttttcaaagttctgctataattagttattatcaacactgcctcttctttctctttctattataaagtgataccaaaagttctaagttgggaataatcatttactttttatctgatcttattttttttcttcctgtacttttttttatctttctacttagacttgttttataatagtttccttaacgtatctgcattacattatattttaatacaattattatcatttactaactacatgttgttcttattaaataatataacaaaaaaaaataatataatccaatactagaaactcccctttaattattaatttattgtaattatatttattctatataatttgtgtataatagatatagtccaatacttttttgaacttttacttttcttcaagaatgttcactttgtctattcagaaatgattagacaagtgtatttattaacagacattataccgacattaaaaatattagttggaacacttctatttaaaaattcattattagtctattagtaacagagaggacagttttcttaagaaaattcaaaatgttatattataaactgaaaaaatttgcaaaagagtgaaagaaagcaaggtactgctatatgttaaaaaaaacctataataactggaagaacactgaacagaaaataacattcttaggtcagtttatggtcaaaatgtatttatatttagagacaaaaaaaatacaagtctttgaagttacaaaaaaggagaatgttgcgaagacataagggggaattactttatatgttctcaaaacgtccacgtcataggtaagtgctaaaatatctactataaaaaagaacctatatatagttttaacctgaatcagtcaagaaagatgaatgtaattaaggaaattctagagatattattcttggtataaacaaagaatatgtattttgatttcaagtgtttatggaacaatataacgcaagaaaggaatgaaagtggatatatattttttaattgttatgagcgtgaatttttgctattcaaaatatactgtggggaaatacgtaaaatacttgttaatagtctattcacactattataacaaaacgtcatatacgtaagggatatacattttatgagttggtttctaaaaaaaattgctataaatatttagatttacatacataaaaataacgcttttatgggggtatataattagatgtgaggaggttataggagggaagataaaactaagttattgaaggagtaattatgagatcaaaaaaagtaagaagggggaagagaggggcaactaattttaattatgggctttctttagtagcaggacaattcagactctctcataaaggtatatggtaattcgttatttcctcttttttaaccggttggtaagttttccaaagtaggaaaacgaaccgaggtgtttttaattgaattgtaaaaattttttgattgatattagtttttgaatatatttacttgtattttattatgatcgggaaaaaaaggcaataaaaaagaaaaaaaaaaagtaagaaagttattccggccgtcttgtcagagtttttccgattccgaattaatttttccatgatcagctcagaaagataacaatagtagtttcgttttttttaaaaaaacacataatgtaaaaaaaagataaaaaaataacaaaaaaaaagaatcattagagtgatattgaaggctttatatagcaatacacaagaatgtgctattgctatgaagtaaagagaagaatcctgttggtttttatacaagtattcttactaaaacaacatacatatgttcgatagatttcagtattacaaacccatccacaaaaagattagaaagaaataggtctaaagagattaaaaaagaaatttacatgagtatatcaagtagtagctagtatagtatatatttgtgttttacttttagtggaggtattttgagtgccatacaaaaaacaataggtaccatttttttttattattttattttatatgtaattgtaattaatttagaactacagttagaagctaaagatctcgatagactctgtgtttatttcttttcaaaataacaaaatagacttatttatcttgtcaattgtggttaaaaacaatttttttaatcttcagtttcagttcgtacataaattgctaattacacttgatatagttttgcatttattagcagtatattatagtaatttatcttcctaagacaataaagttaattagaaatattatatttgtgtagataattgttattcggaagaaaaagagcgaggaaataacaatatgtatttttatttgaaaaaaaaaaataaataaataaaatgaaaatgaaaatgaaaatgaaaataacccctctcccccttgtgaatgtatggggaaaccgtggggtacagaaaaatgcacatttatcggattaatatcatatactagaaacacactattgttctctggaataattatgagccctttcaaaccaaaaaggataatagtcatatctatatacattcctttgaataacctagaaaaaacactcaattattttttcaaaaaaaaaaaaaaactttcttaaacctaattactctttggaaattttgtatagtattaaaccatgatctttattatatgtgaggaattctataaaatacttggtatctttttaaaatataagtcaaactattagttcatttacaggtattaaatgaaaatcaaactatatctatccaaatttctctcttctgaccagtaagttaattgtctcgaatgatgtttaagaatctaactaatagtcaagattgatatgcatatcttggtagtattaaacagtattatacttaatcatactagttttcaatataactccagagcaatagtaaggttttgtttgataagcttataacacatttattgaattttctttttttcttaaaatctttaatattggaaggaaagtgaccgattacaataaaataaaaagtactgaggtagttacttctcaatttgtctgtgtaagtcgggaaaaagtaataaaaccctaaaggctttgtaaggtattgttcttccattgggctatagaacaaaaaaaaccttttaaaaaattttctccgcaatttattttcctttttaattgtcaattgtagttgtgcgtctgcgggggggtaaaggaaaaaaaatttttccatataggaaaaaaaaaaaggaattatattgtttcttttttccgttccatcctatatgtgtttatttttttcattttatactgcgtttttttttattcctcttagttttgccgtttaggagaaacgataattcaattgtaatggagaaatatccggggccccacgggaaaatatgggaaagtatgggaaaaaagtttttccgtgttttgaagtacggaacaatagatgctattgtatttagccaaaaaaactattatctaatctatatggggtagaaaaaaaaagaaaggtaatcttgtgaactggagaagtaacgaccatttactatgtttgatgaaaagaaagttacaatagtgctattattaaaagtatttcttttttgttttctttcttgttttaattgagctggggtaaaaaaaacaaagagaaataaaagaaactgtcgagttgagtgtcttctcgtaaaacatatataaaggaccaatgcatctatcatttcctcgagtctttccttaaagttttctctcttctgaataaacataccaaaaaaccaaaaataaaaagaataaaaacccaaaatatataatatgtcagaagaagaacaactatcaggagctgctcaagactccaactctattatatcctctccttccaacaaggctgaaggagatgtatacaaggatgatgctgatgatcaaatggtccaagctacagacatgccggtgaaacctacttccgcatatgttaccatttctattatgtgtgttatggttgccttcggtggtttcgtgttcggttgggataccggtaccatttctggtttcattaaccaaacagatttcgtcagaagattgggtcaagtcaaccacagtggtgaacactatctatctactgtcagaactggtttaattgtctctattcttaacattggttgtgctatcggtggtatcatcttatctaaagccggtgatatgtacggtcgtagaatgggtttgattattgtcgttgttatttacattgttggtattgttattcaaattgctactatcaacaagtggttccaatacttcattggtagaattatctccggtctgggtattggtggtatttctgttttatccccaatgttaatcgctgaagtctctccaaagcatttaagaggtagtttagtcgcttgtttccaattgatgattaccttaggtattttcttaggttactgtactaactatggtaccaagaactactctaactcagtccaatggagagttccattaggtttatgtttcgcctgggccttgttcatgatcggtggtatgacttttgttccagagtctccacgttatttatgtgaaaaaggtagagttgaagaagccaagcgctctattgccatttctaacaaggtctctgttgatgatccatctgttcttgccgaaatcgaattgattcaagctggtattgaagctgaaagagaagctggtactgcctcctggggtgaattattctctgttaaagaaaagattttccaaagattaattatgggttgtatgattcaatctctacaacaattgactggtgataactacttcttctactatggtactactattttcaaggctgttggtttgaaggattctttcgaaacttctattgtcattggtattgttaactttgcttctactttcgttggtatttacttagttggtagatatggtagaagaacttgtttgttatggggtgctgccaccatgactgcttgtatggttatttacgcttctgttggtgtcactagattatacccagatggtagtaagaatacctctgtttcctccaagggtgctggtaactgtatgatttgtttcacttgtttctacattttctgtttcgctaccacttgggctccaattccatttatcgtcaactccgaaactttcccattaagagttaagtctaagtgtatggctattgctcaaggttgcaactggatttggggtttcttaattggtttcttcactccatttattaccaaggctatcaacttctattacggttacgtgttcatgggttgtttatgcttctctttcttctacgttttcttcttcattccagaaaccaagggtttaactttagaagaagttaatattatgtggttagaaggtactttaccatggaaatctgcccactgggttccaccatctaagagaggtgctgattacgatgtcaatgccttagctaatgatgacaagccaatctacaagagaatgtttggtagagactaaatctacaagatctcttaagggtttttttaatatttaatatttaattttatgcatgtatagtttttattcatagtaatgttttttctaatagatatttttatgattgtttatttacgtttctcttttagatttagttttgttttgttttttttcttttaaaagcaagtggtttattttttgctgttactttatagatatgtggtttccgatattatatatatattttttatacctgtaatcatctttcattgtgaaaaatgtaactaaaataatatatcttgaaaagaacaatggaaagaaaaacttttttacgaaaagaagtatgggtatatcggtttgtatgtgtttttcttttaatagttaatattttatattaaaaagatgtagtgaataattttatatagatgaatcagatgctggtgatcttaagtgagatgaatttattaagatgagtatttctttgtaggagggtgagtatattaaagagttacttatcttttaaattcaataactgttgatctgggttttgaacgataaaatatgttagttatctttatattgtttatttttttagttcagctgctttattttttttaaaaaatattttgttccaataatggactttgtttaataaatttaagaaaattatatcttttttttggactttttaataattgatattttgtcatttttactgagaggtatttttattttctaaatgagtcttgggaacttcagatctctaaaataagtaaaccagtttgttttccactttttcaatctagaaataagtaataaaatgttactatctaatttttttcaataaaaatatgttgaaagaaactaataaatttacagtagtttctgatgctgtttattaccactttttgtaggtatttttaccaataataatttatatttgttgaaaaataagtagagatgtcgataatttgaaattattgtattaaatgactggaaattataagaacatatataaaagaaagcttgacaataaaatgcattcaactatatattattatattttgtatattggttatgtaaaattcctttggataaataatattagtatacatgtctttagcgtcggtgatcatattatatgttattattatgtattattattatgttaatatgtagagtaattttcccttgatctcatatttgggaattaataattatataaatataaaagaaacatatgataaaatgtatataaattattcatccagattggaaaattaataagcaaagtcgtctgcttatatatgtttaccttttggcaatttttcataatatattaatttattttggttctgtttgatcttatctccgtaatattgaatgtgcaaaacaaacatttttcctttttgatatatttacatgttacccaaaccggtaatatatcactccagcaaaaataaaagtagaaagcaatataatatagatttatagtaccattaatattctactataagtagctgcaaatttataatatcactaatatcttattgtaagtttatgttattctgttatagtaatctataataaattttaatggagtctttaatactgaagttttgtgtaagccgtaattatatttttattattattttaactcgtattgtatttttttggtcttatcttgtgtgttcctctatgatatctagtaaattattatcttcttactaaaatttgtagtagttactaaggacaaggaaacactgaaaaattatatccaatataaaataaggaaagaagaaatttttgaattatattaataaagttgttttaaatttaaaaattattcattaattgaaaggtaaaagaatttaaaaaaatatttttctggttaagatcactaacaataaaataagacaatttttcatacatgtttgttttttttgccttataatatttccatttactatttcttaaggcaataatggcaactgttgtttatttcgttgctattaatagagactggttttggtgttttcactaaaaaaaaattttttttatttttaaattttacttggtaatttttattggaattaagtttttttatacaaatgataaatatttacaaaactataaaacatagttataaaataaacaaaaatttttgatattcataaaatcagatacattagtaacaaaaacagttttcctaaaaagaataaacaaaaaaaacctttaaaatatgaaaacagatacaattgcaaacaaaaattgaaacccttcttttttattataaagaaaatcattaagtttttttttttactcaaaaataacaacacttcattatttttttcattaaaataacaatatttaatcactaattttgtagaatacttacttaataaaacctatttttttttaaagaatatatttttataaaataaaagaaagatttgagaatatacaagataaaagaacactttaattttgtacacccattaactttgttttaaataaaatcattaacaaagttaaaataaaaaagaaaaaaatttcaacagaaaaaatgacttcaagaaatattaaaatactagttaacaatgaacagccatgatatatatgtaaggaatctaactgaaaatccagtagatacgcaattctgagggtaacacctgagtgtaagggttgaggattggtacagccatgtgcgcagaggctcctataaggtattgaatctgattggaggatttccagggagtgataattatatcaaatcttgtcaagaggcctttaattattgaaagatatgccaggggtaatcatcttatttaaatacatcttagtaatgatattaagagctacctcttaatatcatacaagaacaacaagaagaagaagtaataatactacatcgggtttattaattagtgatatatagagcttacgtaagagtgtttatacttatactaattgatatgattcatccttttacatacaacaactcttacaatatattgtaacaaagtttaattttttatttacaccacttttatgaaaatattttattttctttgtatataatacttttttaattaaataaacgaaggtgatctttagaaacagttccattatataatgttgaatatataaaatagtatatgttaagtcaagaatgtttgtagcaaaataatattgtgaacgattattcttattataagttatataattaatacgacataaaaaacaagattaaagagcatcttatggactattatttttaaattctctatgttttttccacctttttgcctaaagtatctctcaaaaatacttaaacagtaacaattatcaactctacttctttgcaagccaagaaacaaatcacttgaaaggaattttaaatccctttttattaaataacaaccaatcacgaaatagatacattcaagcttaataaacactaataaaaaaaccctaaacaatatttttctattacatattctaaaccctctttccttatcaagaactgggggatattattagtgttgctatttttttttcaattctacatcgctagttatataatattcttttctaagagtactacaaattaaaatataaaaaattaagtgaacaagtaatcttcaaaagcatctagagtgatcatgttgaaatatgattaaagttacgtttgataatctaaattcaccgtactaagtgattaaaagttatgaaaatttatattaaagaagattcgaagataaaataagcatactgtataatattgtatcttggatattacttatgtagaaagaaaaagaccaaacaatacaacaacaatttatattaccactaacttcttactataaataaccagaaaacttataataccatcaataatttattgtaagttacattatcgtattgtattagtttaaaatgaactctactagaatttttaattccggagccttgcctcaacaggtcaatacaaaaagagagtaaaagataaaaatacagcactaattctaataagaatgtactaattttccttttaagcattcttgttttgttataaatatgagattagccaacacaacatatattttgacataaagtaaaaacattatactttaaataagaattaaaaatctttctaaacacaaaaccgaggccctccctcctttttttatcacactaacaaattgtgcaagtatcaacaaaaaaaaaaaataaaaatagacattaaataaggcaataaggaaaagttccaatccgttaaactgctttttcatctgtgcctacagatgtctattattctaaatactttgaaactttttattcaaagattaatacaattttaatactgtaataattcatttgcccatttttatttttgtagggagtggggagggggggagcggtttaactagactaccccacattaatatgtctaattatcttaaaatagatatacataaaataatagatcgaatgaacagtaacttatcatcttagcctacaatatttacttttttgatttactgtttaaaccaaaactgctttttatttagatttggttaagaaaaatcttaaaaaaaaaaataagaacaataacctataaagcccaacacaataaacttagatataatagattacaaaatttttgatattttgttaattatcagttgatttttttagttcttaatatctctttaatctttcataacagtttccatatgtaacattacatagtagagagttattgataatatgattattaaaatccttactattttccagtattgtataatttttcttgtggtcgggacaaatgttagcgcactaaaagagtttaaaaacaaaaaaattgaaaaaaataaaaagagatacatatataacaccgatacaaaaaaagtcgggcagaagacaagattttgtattctctgaataattatagttatctgaagttagggtttgttcaaaaaatattttggaaccatgcatttacatggatttcgtgtagagtttcagactgaataatatactttaagaaaactcgaccatgaacttctcttctctatgtattcatttttctacgatactataaatctgcgggaaattcatgtaaaatatccaatttatagatttataactagtcatttaatatctttctactaaagtctagtggtattagttggacaactggaaaggaaaaaaagttattctttacagtaactaagtataaaaaatatgttgatactaaagacgtatattcaatcacatacagtaattaacgagaagtcatagcattgcctgcttttgtatattcattactgcctatacaattattcatggataataactggtctttgctcaaaccaatattattatagttcagccttaaaaacatttgacatacagtgcaaggtagtagggttgtaataaaaattccagaaacttttctttagaggtacattttttttacaagactttttgtgtaagagattttaaaaagacgccgtcaatagtgagataatttcctaattctagctttattgatatgaaaaataaccccactttacaataataaataaaaaaaataaaaaaaaatttttcttctccttgctattgtttctgtttttagaaaaaattttctaggaactattctttctcgaaaattttacagaaaaaaaaaagtttatttcttttttaatttatacaatggtaatttctccagaaaaagaaatttttcgtttcaaatttatgtctacattagatattctaattttaacaaaaaccattatctccaggactcgacaaaagaataacaccgacatcctttgcatataattttttttaggtgtttggtatcacattttcattttttaaaaaaaaaaacatttctacatagaacagacaagttatagtaatacttcggtgttttcttgaaaatatagttgttaagaaaacaaacgatacttcaagtaaatgatacaagaaagtagtttctcttgactggaaaaccctttccctcctttcgtaaatagatattaatactaatataagaaaaaataattacttaatcctacaattttgtttcacgatattcccaaagctgtttgttttctgttccttctgtattcccactatttagcttcattgcttcatttcgataaggcttttcctcttttttttaaacaccttttttgttctaaatttgcctgaaattttagggaacttaaaatccacaattattttcttgtcaaaatttccaaagtgtttttttttttattttttatgttttccatttacagaaaaatataaacactagcaaaattccgtcctattgtgctaaatactgtattgtaaaagtttttttattgagtttctaaacaataggccccgaagcaagtatacgggggtcaatttttctttttatagctttcttagaaaatttttttgtattactttttcaaaagcagtgtataccatacattataataaacttagaataatattaagggtttttagaaaacaggcaaactctctaattaattttgtttttatagtatggggtgacttaaataataaaatttttctttttgtattatatttttcattttaaccctaatttctatattatttgatcaacacaaaaaaaaagaacaatcaaaaaaaataataaaatatgtcatttattgttcaacggaactttctatttttttctaccccacataaatgtgagaatttcttaaaagaaatgaatttcagtttacttttttttacttactttttcttctttaacattaaatttctttttagttaataatgttaagacagtacatcgtacaaaaaaaaacctttcctcccccccgaattcgggggatgttcaacagaaagaacaatagaaaatttttatgtccttctagggccccacatttgtacaccgataataatcttcatattgttttgcgtatattgtactctctacaaaaattccttttcttattgttactgaagttgtattacacagaattcccatattgttatgttccccctactaacaggggcattcaagaagatcttacgatcttatttttcatttttcatttttaggtttacttttttgtattgtattgtttagaaattaatctggaggaggctacaatatgcaacaacgaggagtagaagccgattcgagataggaatgaaaaattttttcgcattgtgttcgaagctcaaaatatagagcaaaaaattagcgatacaaagtaatcaaaattcatcaatcaataaaaaaaatcatatataaagaagcaatattcaagttaggtgaatctcgcatcagtcgcctttctttcctttctgtcatatcacgttcaggaagaccgtcgagacaactttaatttgaaaagttatcatatttattaaaataaacaagaataaaaaaaataatgtcagaggctgatgaaagtcaagttgtcgttggacaacaagaaaatgattctcattccattatctccactccgtctaacaaggctgagggtgacgaattaaaggattacaacagtgatggtgctgaagagcatttaccagaaatgccagtgaaacctgcttctgcatatgttaccatttctattatgtgtgttatggttgccttcggtggtttcgtgttcggttgggataccggtaccatttctggtttcattaaccaaacagatttcatcagaagattgggtcaagtcaaccacagtggtgaacactatctatctactgtcagaactggtttaattgtctctattcttaacattggttgtgctatcggtggtatcatcttatctaaagccggtgatatgtacggtcgtagaatgggtttgattattgtcgttgttatttacattgttggtattgttattcaaattgctactatcaacaagtggttccaatacttcattggtagaattatctccggtctgggtattggtggtattgctgttttatccccaatgttaatcgctgaagtctctccaaagcatttaagaggtagtttagtcgcttgtttccaattgatgattaccttaggtattttcttaggttactgtactaactatggtaccaagaactactctaactcagtccaatggagagttccattaggtttatgtttcgcctgggccttgttcatgatcggtggtatgacttttgttccagagtctccacgttatttatgtgaaaaaggtagagttgaagaagccaagcgttctgttgccatttctaacaaggtctctgttgatgatccatctgttcttgccgaaatcgagttgattcaagctggtattgaagctgaaagagaagctggtactgcctcctggggtgaattattctctgttaaagaaaaggttttccaaagattaattatgggttgtatgattcaatctctacagcaattgactggtgataactacttcttctactatggtactactattttcaaggctgttggtttgaaggattctttcgaaacttctattgtcattggtattgttaactttgcttctactttcgttggtatttacttagttggtagatatggtagaagaacttgtttgttatggggtgctgccaccatgactgcttgtatggttatttacgcttctgttggtgtcactagattatacccagatggtagtaagaatacctctgtttcctccaagggtgctggtaactgtatgatttgtttcacttgtttctacattttctgtttcgctaccacttgggctccaattccatatatcgtcaactccgaaactttcccattaagagttaagtctaagtgtatggctattgctcaaggttgcaactggatttggggtttcttaattggtttcttcactccatttattaccaaggctatcaacttctattacggttacgtgttcatgggttgtttatgtttctctttcttctacgttttcttcttcattccagaaaccaagggtttaactttagaagaagttaatattatgtggttagaaggtactttaccatggaaatctaccagttgggttccaccatctaagagaggtgctgattacgatgtcaatgccttagctaatgatgacaagccagtctacaagagaatgtttggtagaaactaggtctacaagatctcttaaggttttttctctaatattcagtacttaattttaatgtttttaatgatttaatcacgcgtttaatatctataatcttaatacttaatattttatatttttatattttttagtttaatacatccaataatttgtaagttttaatacttgtgcttttgtttcttttactatgattctagacagtggtccatcctttatcccaatttagaaagtatgggggctgccagggaaagactttttctttgcgagcacttttctttcttttttctttttcctctcaaaaagaaccatcgtgtttttaaataattatatttacaaaagtaagtctgtattaagtatccgtagaccttgaacctactattaacaacaaatattatctaacaagtaagtttacaaacatttaagtagtatataaaacatctttgaaatatatgaaacgatggttccttgtagacactaacactcttttaaagcaataggaatttttcatatgtcataaacaactttactcaaaactataaaacaaaacataatcaatgaagataacaactcgaatatatactatttattgtcattaaaataatggaatattagatgttgtttcaacctaaaattgtcaaagataagggaaaatattgtacaagcagtgtttatcttttttttttttgtgtgtatgtatttgcttgctttaaaacatgttatttctttttctcaaaaatacaggccgcataaacaattatttgataatctttgatctgtttcccctttgccgtcacaatcaggtactcaagcattctaattaagtatcaaaatttcaactaatactaacagataatcaacattaaaaggtttttaattgtttttatatacaggaatactattttttaacgaagaatatttttattattctctatctagctttgatatcaatgttacttatatgtaactttccagacaggtttcctcagtatttatgttaaattttcttattcatacttaagcctggcagccaagttatctccgttatatcgcaaaaacaaggtcggatatgaatattatgcttttttttgtgtctgtagtaatacattgaaagttatcactgttatctattattctttctaattttttaaaaaagatcatatttgaacgtactattttcagagtttaaaatggcagtaattgaataccattttcttctctaactctatgtacaatcgcattgcacagtactaatatagtagaaatgaaccttttttatcaatactttcataaataaataatttaattgctaaacgaatactaagtacagcattttctatatttgtaaacaattctatttttctgacatcactcagctttgtttaaaaaaatgtttgagatttaccaagggatttttatcttactatcactttggagctatatacttaaggcataaagatctaatattttcttttgagtgagactgacaagacttcattccagtcttcttgaaataagtaatagaaatagattcgtaagacatcaacttttactgtttttatatttcgcattcataggaagatccacccaaggtgttggtgaaactagtggttatagacacttaataaagttattagtttattttgctataattagaattcttttttttcctgtgtaaataataaatataaaatataatataattacaaaaatgttaagggtgaacttgtgaaagttgtttctttacatttctccatttttttgtaactaatatcaactttaaaacaaataatcgattttcacttatttcttatccattacttcctttattagtttttaatagtgttatgattaataatgtttaatgatttatccgcaaatatgttttgatatacttaacacacacttaaattattcaatctcatgtgacaaactaacaaaaaagaatcattaagttacaagggtattcaaacaagtgtccatcaaaatagaccatcttttttcttactgtattgttgtattcaaacatatgtggtttaaatatgacataccttattaacatacgcattgttgattacatcttttagataatttacatgatattacaacatatttcatcatattattttcacaaatgtaatattttgcgtgcaaagcccatactgggtaaaacatatactaatgaagattagtcttcatttttaagagaataaaagctcaataaactgaacaaagtttccgttatatttgtcaagatctttctcacagtctctctattttcttctttttttaatgtatattgtcccgacatgatagaaagttggatttagaaccatcacttgcgatcaaatttccacatgtaacgactgagttcgatttcttgttgtaattatagtttctagtagcctcctaaaaccatagaagggaacaatacacacaagaaaaaaaatcccattggctcacaatgttatcaaatatccaaattctatttctaagaatatattcgcaacaaaaatataacacattcttgtcataaaatgaagaaaatccaaaaacatagacatttgcaatatctgaaacgttctaactgatttagaatataaaacatgacattcttttttttttttttttttctctttctgtaattaccgaaattaagaaatgtcagaaataacatatttctctaaaatccgtgcttgtttgcaaagatcctttgcccacaattggagtttttctttgtcctacacagaaaagaaaaaatgagctagactagccattgacaagaatagaagcagaataaaaaaaaagcaaccaacatagtaatttctcaaatatgtaaacaaatatattctttgctttttcgcgttttaccccttttttacatcttggctagccctcataatacaatagcatatgcaagggtcgtcaggatagttttacatataaaaactttgaaaacgcgaatcttcttttcttttgtttttgttccccccgtatcttataaccgcgatagaataatttttctgaaaagccctaattctcggttgctttttttttataaattttttttcttatcaccaaagaaaaccctgattgcaacagagttgtgccatacagttaaccagctaataagaaatcaagaaacaagatcacctaactacccttgttgtaataccttattctagtgatccataataatttaaatctttccatatatttttactctcattaaacatcaaacttaacatgactattttaagagcgtgaagtaatatcctaacgtaatatcaacgcaggcttaaaatctttgtaactatttttatctactttttttaaacgtctaggcccagtagcatgtaagaccctttaaaaatattaaaacaatctcaaaaccattaaaattccatatccataaccctaaccttatcatatttcatggagacctaggggtatatgccaaaaaaccaaacaaacatcacaatagatcgttttaacgcatatatgacactgtatttctttgtttacttttttttgtcggctttttgcattcgcgtctgtgattcctttttggtttttgtttacaataaattatattcgcgtttaccgtttctcatttccaaagtgggtaaaagcaaaatatattttgtagcattcaaaacaattccttacttttttattacataatttctttttctaaagaacaaaataagacaaaacaagtttcattcgataaatagtaggttcataagaatcaatcttcaaaaaatttgatatataaatgcaggataattgtctcaaacatcaattccgaggtgttctccaaaacatttacctcattatcgattctcaatgtctgaagaaaccgaacaaaacaaaccactcgcttacgcatatacagtaataaataaaaatgcaattcactaccgctatcgttgctgccaccgccgctttaatcaactacgtttctgctgaatccgttgttgccatctctcaaattactgatggtcaaatccaagctactcacaccgctgcctctgcttctcacgccactgcttcttcttccgctcacaccactgctactgtttcccaattctcttccaacggtgctgctaaggctgttgctggtttaggtgctggtgttgctgctgctgctgctttcttattataagggtgatagataacattatcattttcttttttcttttgtcttaaaaatataattttatttttctctctttaagaaattttaagggtttattggtataactacatttgatgaaagttttcattatttatacattcttattatatactatataacgtttttaatttaagcagtttaatacgataccgaagttttttttttgaagttctcttcacataatgtttagatattcttcttgttatgttttttgtcctttacaaggataattcgcagtctcccttctccatttataactgggagggaagagtacttcctcaatttcttagttttatgtattcagtacatgtgttgtataataaccgccttttagatttatctatttttaacaatatccatgaacccatatagaaccttagaaagcactaatctaattaattaaaagaccttagatcaaagtattaaatatagacaaacaagcattacaaactcttcaaaaagacaataaacagaaactgtagtaggcaactcagaagataaacattctatttagcttcaaatattatccaatagtaactacaaaactttaaacaatactccatacctcttataatgattacttaaaagatcaactttcagatgtgatcaactttatgatcctataacttaaaacctttgttgttttatttaaaaacaaagcataataaatatcctgttaataacaatagtttagatccaattactttattataaatttaacatcgcctctatcgtaagtaacttatagaaaacaatgcttcttattgtaatctaatacttttaatagtaaaatacattattgaatagaagaataatattctttgtatatttcaagagagagtgaataaacgttttatatctttctctttctctttccctctcctgtacctttctcaatgttctttcaaattatccgtctactcttagtagaataatatccttagcgattatcgtgatcctaatctttatctgtcactggattttttttttttcataatattttatcttccgtctccatcaataaaaaaaaatccatttaaacaggagcattactataataatataatataaaactttgaggaatttcaaaactcaagatcatgtaaagagatgggaagaaatagatcaataaactttaaaatttgaatagagaaaaaatctgcttttgataattatctatgtaatctcactgttggttagtgattatactgaataaggtggttatcaattaaaaatacttttcaaaagacaaaaaataatcaacttttaaatatgcctacattattatacagattgagtaattctccaaataatgagaacaaataaaattcgttcaatatatagctacaaaacactgaccagagtcctttttaaactacttggatttactattgttaaactggggactccagagtattgatttgaaaaaatttcgagttatacttcctaaccaagttatataatcattctatctaattcaatgatctttttttctcttcataggttctgtgtttttgaacttttaaagtatatcattctggaatagctgaacatttatcataatgatatgtccaacatcagctacttctttaataactattggaataaatactctcctaacacttaacaaagtaattataagagttgttgtatgtaaaaggatgaatcatatcaattagtataagtataaacactcttacgtaagctctatatatcactaattaataaacccgatgtagtattattacttcttcttgttgttcttgtatgatattaagaggtagctcttaatatcattactaagatgtatttaaataagatgattgcccctggcatatctctcaataatcaaaggcctcttgacaggatctgatataattatcactccctggaaatcctccactcagattcaataccttatacgagccactgcgcacatggctataccaatcctccacccagacattcaggtattaccttcggaattgcatatctactggatttccagttaggttccttacagtaatataatgatctttattcagactaagtaaagtagaacaatatcctacttggtacttgtagagaaaaagagaactagatttttaattcaaacaagaacctaaatataaagctaaatcaactcctactctatcttcctctattaaagaattcacttttaattcactcattaacgtgcttatttcttttaatgttacaattttccaagtgagtttattactattgagatctttaaaaatgttaatgggaagttgccaattgcaaaacctgaacacataatagcgaactaaattttcattcatgctgtgaaaaagcaagatctagtcttatgcatgttaattgtcttaaattatccgtatattaatggttttaagttaaattaaaccaacatattagtcatctaaggaatattaattctctttcttctgaactatacggaaaacttatatagtattaagtattccttaacaagatgctaatttttttttttaattttttttcatttcaatttgtttaaacagtatcaatttgaataataatttcttgtaaatcttctttgccaaaatttcatttttttgataagatgccttttgaaccagactgttatgttataattgcatagaaaaacggagaatttgtgacagttacgactataatgttgactgctttaattgtaatttctttgaaaattcttttttcttttactgaataggcactaaattgattgaaatattccttattaaattactcattatcaaatgaaataatcacatataactctattgcttttaggcattgttcaatccgtattttcttcctttgcaagtttcttcaaatgctgacaaacacgattgaatacatcgtaacagtaactctttagtttttggaatagcgtcgatatttcttctgttcgtattaattgtaataaatccaaaattgcaccttagatcaatagttttttcaataaattctttcatttaacatattagactttaagatgaaaaacacataggagtgctaacagatatcttttgccttagtaatcacttataatatcatggcattctctcaatgtactatcgactatcctattaataagaccgtaaccacaataaacaataaaatagttgatttttggaatctctactaaaatctctgtttaattttaactccttaataatagataaactaactgttgttttttaatagtattttacaacttcaaagataagcatttttctcccatattttggagaaatatttaaactataatttttaggtatttcttctggactttatattgcaatactcaattagtcgtaattaatggttagaatgatactgaacagtatttacatataaaagtttttctgaacaattatcatcatgatatgtgattttatcttggtaaaatttgtatcctggtatttattatttttttggtaattttattgtaaacaatatagtcaagaacatattgttaaccaataatatctaaaacattatcaatagttataatgttaaagtttctaattttcgcattaaaggaatgtgaaaacaattcaatgaactaataaggaactacaataagaatattgtatcttaagttaatattaaatttgactacttttaacatatgtaacaaacatcgcagggaataagtatcaatttcattgactttaacaaaacaacgcctttttaatggataaaagtcccaagatataatcatatttatcatattcaaaaaaatttttttttagtcttaaaaatcaataaatcccattacgcatgatttatattaaaactaacttccaattctttttcttagatgtcatttttttaaaatgttatcactattagttaattatatattcaattgatgtctattttcaattttttttaaataatttaagttaattaaaaagactgcggtcaaagtataaatttatataagtaatatttcttgacgtatatttagatattccaatatactctattttttgttttagcttgatcgaaaattttaaagcatatttcctccaataaaaaattaataaaaaaaagaacctacctaattaaaatcttacaatcccaagaaagataaatatattacatcaactgaaataaaaccaaaattcatgcattccaaaatccagtaaacttgttataaggtataatatagatcccagaaaaaatatttttatttttcaaagcaagacctttcattcattagatgaatttttgaccgatttaatgtgtatcctgtctttgactatgaagactcctaaaaaaaaaataaacagtaatagtaaattttaaatacattcgaaaaacagtaaataataaaactgaaaatttcgggtttaataaccttagagacacacaactaattgttaatgctttctatacaacagttcttgttggtaaatgtgtcaaaattattaacaccttacgtaataagtaataataatatttacatgctgcaaaaaaaaattttaaatcaggatattcttttgaaagtttctttttttcattcgttactaaacttgactaataactctaaaaaaagatttagtatatacatgattctaaaaaatgacgtaatttatattaacccatatttcttttcacctaaaacggatatagtattcctaatgaggaaattattgggattaatttatgacatggaaaaattttcaattttcccaaaaaggataaatgtattttatttttatctacagtaattaatctctctcctgaaaaaaaaaatagattgaaaaataaactacttcaatttccaaaaaaggaaatatttcaataattaatttgtttatgcattacttaatttagtaaataggttacatcttcgacttcttttcttttttttttctcctcagtcctcgagttaaatataaatagtattaactctgaagaaacattcaagttatgaaaaattgtaacatatataaagtgagtatttgagattgggaaaacttttctgcgttcgttttttaaatgtaattttacaaatagaataaatcagccagaaagaaaaatcctggattttttaataaactgaaaaagtatcatactacaaatatatcttcacacaacagacaaatatactaaaatgcaattaacttctacattcgcttgcgctttattagccttcgctaacgttgtttttgccgattccccaaaatttggtattgtgtctattcattctgcctctcctgctcatttattaagtctatatgataaaaatggtttagttctatctggtggtcttgacgccttgtccagtgttatcacagatgacggaaaattaaagttttctaatggtaaatatgctgtaattggttcagatggtagatggaccgaaggtactgaggctgaaggttctaccgggtttgctatttcagacagtgaacttacttacaagggttctagcaatttctatgcaattccaacatctactgctggatccttctacgtttctcaaactggtgctagtgatgctattagtatagcattatccgcttggactccaaacggttcccatgctcctgactacactccaactggtggtgattccaattctgtttctgcctctacttctgcttctgtttctgctgcttcaactacaaaagccactgctgctgctgtctcccaaattggtgatggtcaagttcaagccactactgctgccactgttgcagctatttctcaaattggtgacggtcaagtccaagcaactcatagcgttcaacttcaatcagaaaacggtgctgctcaatatggtgtcagtgcaggtgctcttgctgttgctgctgccttattattctaattgaaaaatttctaatatttttcatgcatatccctattttacaaccgcatttgttaccctagattttaggttctttttaattttttttatagttatgtttctctataaatggaaaaaaggaacttttgatgactatataccaatataaataatatactaataccgtaatttaataaatcaattaagtaatataaccaagagtacaagaagatagataaatacttatcatttgtttatatagtgtgtgtatgtgtgtgtacagcacaattcgtgatgtttcctgcgaacatatctaaaagttgtttgggtgtatgtatgtttatattcactccagggtatttgatgaaatctttaacataacttatgtccaatagaataatttatgtaccagctgatattcctttctaagatttaaaacctgccatatctcttgaacaaagttacaagaagagaactttagaaggtctacaattcaagcatagcagactggaaacaatattctgagtcctctacaattacaatagtaatataaaattaggttgtgcagtatgcgtcttggaatcattatgaatctctttttttttttcttttgcaggattataattttatagaaaaatcaacacataaaaggaatgtgtttatatttttgtcatcttaatataatttactcagtctgaactctatacagaattcatataaaatactcgagttacaggtttacacctaccagccttatgtcttcttcctagtatccagtaatagtagtaggtgggtggaaggaaaaaaaaattcttagaataactaagtatagacaatacgctaatattaaaaacgtgtatacaacaacgattacaaaaaggcaatttgtggtggatcatgtcgttatttgtctctgtatattcactactgtccttgaataattattaggttttgttccaaccaatgttcttatgattcaattaaaaaaaaaaagattagatatgcaacgtgtcacggtggagttgtaataaagcttctaatggcttttctttagggatacatttttctagaagacttgttatatgaataaatttaatgagaaacggcaaaaaaaataggaaaaaataaaaaaacctttaaatgtgattgaatgaacaactacacatccgtacacccttaccccattgaaatgcataataatacactcttttgttgttttagttgactaaaaaaagaaaaaaacaataatcaagggagactgaatgagatgtccggatgtaaatacaatataattgtaaggtcgtattatcgccccacattatatccaaacgacaatacaacttaatctaaggtaatataatacagcattacaatacaactctatcaagaataacatgattttcaaaatataatagatgaaccaaacaattgtccacttcttttgttttctcttttatttaacaaaaacaaagaaaaggacaaattaacaaagaggaatttattgaatagttaaattctggttgaattttatatgaagacctaacgttgttttagcaatttctaactaatttcattttaatcagttaaaagttactaccaacttttaaatcaagaacacttcaccccgtttataattctacttcgatattgttttttttttgttctttttttcttttttattctttttcatttgtttagcatgccactatctattttattatttatttcttttctcatccctttcaaaactctatttttacactttttattttctgtcgagtcattttacttattttctcttccattgtccactttctgcgattttcttccacctttctttctcccatcgtcttcttctccccccctttttttatttcttctttttaattcttaaacctaaatattgaatcaacaaccagaaacaaaattcaaaatcatccaattctgatctcaatagaaaaaaaacaactttcccctcctttttttttcatttttatttgcaacacttattctgcatcaaagaatgtgaggaatttaccatttttcatgggtaatcatatctctttgagtttatatatgttgaaaaaaaaacaaataaaatgtcttttcttctctcttcctttgtttctttaaaagcaaatatatatttgtgtagatatatttatttttgtagcgcctctggcatagccactccttctttctttctttctttcttttttcaatgtcagttataaatatgttgttacaagccctattgctgtctttctttcttcttttccttccatcttcttttgccaatcttattgttaatacgtgtgtgtagtactgaagttgaaatcaatgttttacttataaaaaaagaaaagtagttataaatatatatgtaaatatacacaaccccatatatataaccccgacctattttttttttttgactgcgcttcataactgattaagttacttgtccgtatttccttagtcgtgattgcacatttttattttgaatgtcctcctacaacgatatttttgaaagagctgtgcaggatccatgttcagatgcgtgtgactgcgaagattctatagcacctactgatgctaccgtcaccaccaccatctcatcaacaacaatacccatccccattgctgcagacaatatactttataaaaacatccccaatagaagactcccgcaaaaaataatttttaatgacgtatttgacgatgatgcagacacagaggaagacaatgctgatgaagaagaaaacgaaaaaaaacatacacacaaatatacacgtcgacataacagtgatgatgctaaactagacatgactaaacatgcattacgaaaagttaatacaagtccactccataatatcgtatctgtcccacagagacctcaattacacaatagagcaaacagttgcgccctcatacaccaactttctcgatcaaattctaatgccgctgctaacccattgccctatccaaaaagggaggatgcctttctaacaagaacttcttctgctaattacttttctaattctcgtagcaataatattactaggaataatagttatatctcggatttccattgtaattcactaagaagacagagttcttctttggctattcccacccatatctatggtttggaaaaatatgtatcaagtgaattagatgaattatcttcatcctgtgttggtccaaatacacagtccataactacttcgccatcatcatcatcaccatcaccatcaccaccaccatttaacagcactggtactaacagtaggcataataataatagtaagaaccattatagcaacagtagtggttatagtcacaccattaaagaagcaaaatctatatcatctaatacaacatctactagaggcaaaacatctgcttcaattccacaaaaaattgaaaattcctcggacaatctttcgtcatctatattgtcacctacttctgtattatctagtgcatcttctacaacatcaactgacgttataaatactaataagaaaaaatcaaccccaacttcccatttaataaaatggaaaaatgcagcattaaaaaagactcatggactaaaaccaactagaaaatcattcattaaagtttcattagcaaattcttttgcctaatcagtaaacattttaaatgccatttttaaaaatatcctccctctctcttttatttttttttttgattcttaatcatctttatatgtctttctcttcacattttcttatttagtcaataaatattattaataaattttttatacatttatatagtttttattcttattctttcagtacagtattctaacatagtgttatatggttaatgaaattaattctttaactattttactctcctttcttctcttttcctccctctttctcctccttctactttacatatacacatttagacctatattaatattatgtaacatgctaagcagctagtgatcacaaaaatcctaaaaaaagagaattctcattctcaacatacatatactgacatatattttgcactatttcttcttataatattatctgaatgtatcataaagtaaattctaataacattctctgatatatcgtccgcatcatctatcaaaacgattgatatatgagtatttcagtaaattttaaaaattcataaaccttttatttttttattattatcaactacattcttcattccatttctcactgaacttagatggaccagtattctaaacgaatagtcactgatctataactatatttgactccaatacttgacataaaatcttctcctccttaatccaattcgtaaaaatattgttctattaaattagaggatcattattcaattaatgaagtgtcagaaataccataatcttttcctaccttaagagatcttccttactatttgaaaatgaacaattaatggaaagctacatcaagtatcacatcacataatttaaagttaatatgtgttatctttctttaacgacaaacactcagtatttgtattccgccataggactcatttgagggtaacctcctccttcctttaggcagcacaagttcatattagagcgaaatttttttttctttttgaactttttgttgaaagcaaaaattgtcagttataataaaacaaatattaaaaacaaaaatatgaaaagtagtagagcaacgtacttaactttttgtttgaaagacatattaacaatatggtatttcacaatattataaatcaccctatacacttaatctagtcaagcaactatggggtcgcatgagttagttccaaatacagatccaattttagatgcagaggaagaattatattttggtaatgatgccgacatcccttctcatcctcatgtcggtccaaattcacaagagaataatgaggcaattcaacctttccaaaacgactgtgcttgtgcctattgtggtatagattctcccaaatgtgttatcaaatgtaatgtttgtaataaatggttttgcaattcaaagaatggatcaaacagttcgcatatcatcaatcatttagtattttcgcatcatagtgtcgtttctttacaccctgactcagatttaggtgatacagtactagaatgttataattgtggaagaaagaatgtatttttattaggatttgtttctgcaaaaagtgaagctatagtagttcttctttgtagaatgccatgtgcacagactaaaaatccaaattgggatacagagcaatggctgccattgatcgaaaatagacaatttctttcgtgggttgcagaagaacctgatgatgaagccaaattaaaggcccgattaattacaccaagtcaaatatccaaattagaagccaaatggagatctaacaaggatgccacaatcaatgatatcgatattccagaggaacaagaagaaattccaccattattattaagatatcaagatgcttacgaataccaaaggtcttatggaccattaattaaattggaagcagattacgataaacaattaaaagaatcacaagctttagagcatatctctgtctcatggtccttagcattgaataatagacatttggcctctttctctttatctacctttgaatccaacgaactaaaggttgcagttggggatgaaatggttctatattattcaggcttgcagcatcctgattgggaaggtcgtggttatattgtacgtttacctaatagtttccaagatacattcacactagaattaaagccaagtaaaactccaccaccaacacatttaacgactggttttactgcagaatttatttggaaaggtacatcatatgatagaatgcaagatgcattgaaaaagttcgctgttgacaaaaaatctatctcaggttacttgtattacaagattcttggtcatgatgttgtagatattacatttgatgtcccacttccaaaggaattctccattgcacattttaataaattaaatgcgtcacaatcacatgctgttgaacatgtactgcaaagaccattatcgttaatacaaggtcccccaggtactggtaagacagtcacttctgctaccattgtgtatcatcttgctaaactacataaggaaagaattttagtgtgtgccccttctaatgttgcggtagatcatttagctgccaaattacgtgatcttggcttaaaagtggtaaggttgactgcaaaatcaagggaagatgttgaaagttctgtctctgatttagcgttacataatttagtgggtagaagttccaaaggtgaattgaaaaaattattaaaattaaaagaagaagtgggtgaattatcagcttctgatacaaagaagtttgttaaattggtcaaaaagtctgaatctgagatcttaaataaagctgatgttgtttgctgtacttgtgttggtgctggtgataaacgtttagatacaaaatttagaacagtattaattgacgaaagtacgcaggctactgaacctgaatgtttaattccaattgtcaaaggcgcaaaacaagtaattttggttggtgatcatcaacaattgggtccggttattttagaaagaaaagcagcagatgcagggttaaaacaatccttgtttgaaaggctaatttctctaggacatgttccaatcagacttgaagttcagtatcgtatgaatccacatttaagtgaattcccaagtaatatgttttacgagggtagtttacaaaacggtgttactattgaacaaagaactgctacaaaaagttcattcccatggcctatacatggtgtaccaatgatgttctgggtaaactatggtagagaagaaatatcaggcaatggtacatcatatctaaacagaattgaggctatgaactgtgaacgtattataacaagattatttaaggatggtgtaaaaccagaacaaattggtgttattactccttatgaaggtcagagagcatatattttacaatatatgcaaatgaacggttctatggataaggaattatatgttaaagttgagatagcatctgtagatgcatttcaaggtcgtgaaaaagattatatcattttgtcttgtgttcgtgcaaatgaacagcaagctattggtttcttaagagatcctcgtcgtttaaatgtaggtttaacacgtgcaaaatatgggttggttatccttggaaatccaagatctttatctaaaaacctattgtggaaccatttattaattcacttcagagaaaagggctgcttggttgagggtccattagacaacttacaaatctgtactgttcaattgacgaagatgcaatcaagaaaggagaatcattatgaagaaacttccaacaggcaattcgacatgggaatgggaatgggtgttgacatggggaaccaagcttttaatcaaggatttgatatgcaaaatttcatgtctttccagattccaggtaccaacataccatttgttcctggattagattctaataatgattttatgtcttatgccaatagtggtacttggaattttggtaattttaccagtccatattctatgagcaacgatcctaatctaaataataacatttatcaaggtctagatcgtccattagattcaaactatgctcaaaaattagataatgccgaggaaagtcagaataagaagagcaatagtgatgtattaacaaaagggttttcttctttagaaatttaatttgttataatggttaatcattgtcttttctaattgataagatatttttttgtaaaagaaaaactacgtaaataaagaggttacaagtgctaaaacttttagaagcgatggaatcaagatattgaaataacttctgaattgtatattggtttttatagatatgttaaatttactgttcatttacttaaattaagggatatttagacttttggaacacgtatacaatattgaaaatatataaaatttttatgattgtgcattaaatagtaatattataatcgtaaatatgttttaattactattaaatagcaagacattttaacacgataaaatatgcatagaaagattatatattcacacagaaggcgagcagaagttaagatagtacaataatcttctattactttttatctctcttctttgtttgctgagtttaagaaaacttaaataaaaacgactaaatgagctgtaatttttccaaaatatgaaaacaacattagcagtttctataaccattattcccactgtttcattccaagatcttttataagccgattagtaatttttgtatcttctatgtgaacaacaatttttttttttctaattgtcttcttaatttttatacaatatactttttatttcgtctttatcatcaaacaaaaagcaactctgataactctgatggccgagtataaagagattgctttggtcttttgtcttcgagatatcttttcttctttttttttagttacgctcctctttttttattttgaaaataacacaaataaaaactaaaattttttacttatctggtgagtagataatattcccgtccaatgtaaaaaatagggttttttcaaagaaagtgtagttttccttttttaacattcacataataaggattaaagatatctcaaaaagaaatgagatcctgtattagtgtaaaggatagtacaaaaaattttccaaaattacttgaagtaattttgtatattgcataaaatattaaagtttaattatttgacttctcaacagcttgtataagtttttattgtcataaatgttgtgcaatatttaatcaatacaaacctttattattcagaaatatacttttgtaaatttctttaagcattaactacaatcaggtttacagaagattaagtttttatagttgataatctttatagaaacctttagggttttaaaaatttatggaaattttcttaaaacaatagaaatattttgtcttatataatgttctttggaaagaattaaagtttccattctctattgttgtttttcgaactcaatttcccatactaaagaaaaatggaagaaccgaagagtagatacactttcatgaaacaatagaaaaccgtccgattgggtgatactgtagaaagagttacagaagaaaaaaaaacaatattacctgattacataagaagaacattatacagatatatgtatgtgaaaagaattattaatattaccattgttactaataatagtaaaacactgtgaaaagaaaaaataatgaagtattaagtcatatcaaaaattatcataaaaaaaatcatggtcgagaaaaagatatataattaacatataattttagaattcgattgataaacatgaagatttgcatttattaaatattaattttcatctacaataattcctaaagtaacagtaaaccacaagtacaacaattcaacatatctaaaaaaatttaatcgaatcaagaaattacatattatttataatattacaatgcctttctctacagattttgaaccagtcgctttagaggatactgatttatttaaaccaattaaagttggtaagatcacactaccacatcgtgttgtaatggctcctgtcactagaatgagagctcttcacccagggaatattccaaacggcgatcttactccaacatattatgctcaaagatctcaaacccctggtactttgattatcactgaagcttcttttatttctccacaagctggtggttatgataacgctccaggtatttggtcagatgaacaaaatgaacaatggaagaaaatttttcaaaagattcacaataataaatcgtatgtttttgttcaaatgtggaatttaggcagacaagcctttccagattgtatggcaagagatggcttacgttatgattcggcctcagacgatgtatatatggatgaagagactaaacaagctgctattaaagccggtattaaacaacatggtattacaaaggaggaaattaaacaatacattaaggaatatgtagaatcatctaaaaaaattattgcttctggtgctgatggcgttgaaattcatagtgctaatggttatttgttacagcaatttataaatgcaagcactaacaagagaactgatgaatatggtgggtcaattgaaaacagagcacgttttactctagaagttgtagatgccttaatcgacgctattggtgctgaaagggtcgccattagattatctccattctatagatctgctggtatgcttggtgcagatgaaccagaagtctttgaaatgtattcatatattttagacgaattagaaaaaagagcacaaaatggtaagcgtttagcttatgtacattttattgaaccaagagtcaccaaaggctggcatgaaaatgatgacggtgctgactaccaacacagcaacgactttgtttacgatcactggaaaggacctgtaatcagagctggtaattttgctgcccatccagaccttactaaagcagccttgaatgatcaaactttaattgcatatggtagatactttatttctactcctgacttagtccaaagactagcagaaggtttaccattgaataagtatgatagaagtactttctatagtccagatgcaaagggttatattgattacccaacttatgatgaagctatcaagttaggatggaaataatctatcagttgaatatctttatgtagggttttttatgtacattagttgatcctttgttaaagtacatataatcatatgttcttcaagaaataagcaataagaaaaggagaaaaatgcagtcctaatagggaatcaatcaaagcaatgaacatgaaaaataagataaacaaatagataaatttaaagttgaatctattttttatataaataattacgaaggaaatcgatataaaaagttcaacaaaaggggattggatccattttgtgacactttaaagaaatgggagttggggagatatagtttctattaactatattcttaaaagttttcttaactgtcttcatgaacatccaaaatgggttaataagaagattttagtctgtaaagttttgttttctattttagttgataaggatatgttcatcacttttttctagaggccaatctggcagaaaaaaagaaaatttttcgttacaaaaagatttttctttataattaaagagtgttttactttctgaaaaaggtactttaaactctttgttgctaaaagtcattttaaaaattttttatagataaaagcaagatgctcttaaataaatttctcatgatatttgaaatgctgatatgaataaatttaatctttcttataagaatcttatgtgttgttaaaacaaaagataacatacatacatatatacatatttaatactaattaattataccatttctcttataacagcttcatgtgggaaagtaggatcagttggatctttaatgatattagtattttggaattcttgatgtttggcatatgctacagcatatgaagcagctgaaatagttaaaccaatggctacgacaagtaggctagtaatcattaatattgatgaacaatattggatgattgccatacccaaataaaataatgcacgatatccatttgtttcaaatttagagataaattcaataaaattatcactcaagggacatatttttaataagaatgggatctcaataaataatatgattagtccttgaatgatacttactataccaaatgcaatgacaccgttgatatggaaaagattggcaacacctaaagcaatgcataggataatattgatgtatccaaaccatttcccatatacactaaaattgaaactcttcaaatcttttaatacccctgctatgttaatgaactgtctaatatctaacaccatttgatctattttttatatttttcttgtctgttgatttatttgattctctaatgaatctgtgtggctgatatatttttaatagttagctatttgttctttcagaaaagtctatacagacaacaataatatgtagctgtatatatatatatgtatgttaatacggcacctgtcatatacaaatatattctttaagtaaaggttaattgctttgctcctctgttctaataattcggatttcataattggaatgtttttaaacgatagtagttgaattatcggaattccccttttgctaagacagaaaaacgaaacaaaccaacgaagatgcaaaaaaaaaaattgaaaagccttaccaatttggccaccctcttttcgtttcaaggaaaaagcacatcgaaagcgaattttgtgacatttttttttgtgtttggaaaagaaaaattagagaaataaagaagagacgaaaagagaaagtggattactgggacaaacaaaagcattaaaaagttaaaaaactttgtattactcttttctaaattcatagttacccccccccccgatagctattgcaaaacaagaagtatttttaatttagtgtaggaactaatacatatacatatatatataaactagaatctctgctaaacatttttctcctttaatttttttttgttattagttgtttcttttctgtgttgaggtttgtattaaattgaaaacaaatttagaaaagaataaatatgttgtctttaaaaaatattgtaagtacatttggtactaaaagagttcctggggtttttttgcatacttcggtgattaatcaagccaatgcattctcaagagcacagttaaagaaggatttgattaaagataaaggtttgaaaaaaccagcctctgcatatatcctttttactaaagtggagagaccaaagattaaaagagaaaatccagaattaactaccatgcaaatttcttctaaattaggtgccaaatgggcaacattatctcaagtggaaaaacaacctttcgttgatcaatataatcaaaattataagatatacaaagatcaattggctcaaatagaaagtaaactaccaccgaagaaaccagtcaatggatttgttttgtttggaaatgagataagatctcagttgaaaatagaatttccaaatattgatcaaattgaaattactaaaaagattgcagaaaagtggaagaatttacctgaacaaaagaaaactcattataatgaattgtataagcaaaatatgattgaatggaaaaaacaaagctctgataataactaaataataataataatatactacttttattttaactatattctatgattgtttttggtgtattaccatttttatatttttaaaacttctttggtaagtatacaagtttcttctttttcttctaacttaaaggttcattaaattttaaattcacatcatttcggaattctgaaagtttggcattaccatttttgataagtttttatatttttaatattattattgtttttattgtttttttctctttctattgtttatgtatctttttaattcgtcaaatagttaattttgaacaataatgtctttaatcaccaataaaatcatttgtttgagtaggtgaactgaatcatatcttgatctataaacagtttggaaatattttacagtattgaagtcatcatgagtgaggttggtaacttaattgtcaacatctttatttgtttgaagattattctttgatttaaatgtaaatttatgataaatgcgtcattgaccaagtatttttttagattagtattggaaataaatttgttacaggtgttatagcactggattagacctgattatcttgtatgatgaccaaaatattgactttcttataatgattaacagttttgtatgcaatgcctcatgaaaatagtgatataatagaatagaagaacatattaattatattgttatgggcctgaaacttggcatatttccaattcttcaacttttaactaaaactataatgtttttgagattgggatgaaaaaagaataattgaattaatgtatgatgaaaaatattagctgaagccaaatattaatctaatataaccttatctttatataactctttgataaaaattaactttaagctgtctaattcaacagatttttccagattatatataaatcagcaagaaatccgattcatgttaatggacttatgtttttcattatttaatttttatagaggccatatcaaattttttattcaaaagactacatcttcttatttatggataatactacgtgaaaaattttttataatgtactaatttctgaatatattaacgttgagctattagattgttgtgctctttataagtatgtcttgtatagtgtaacacaaattacacaggtttttgcactgatttccagtttactgaaaaaatgacatacatgttattatagagctacaatgtctgcattgattctttttatattttctaagttttgggctactgcagatgctttccatcatgaagatttcacaaatgcgtttagttgtggtgggtttatagcatgatggataactactcagtcatttatgtggactgtaggagatattgatgaaaatgtcttgagtactacattcatcgataatcaagtttatttaagattctgagctttaggatttgtaataattcctgttgctttcacttttatcccctttgttttatataatgctttttataggtatagttatgttactataacaaaagtaattttcatagatatatttaagtgtcatgtgagtagaacttatggtatcctaattgtgtggattggttaatgaagaaaaataataagaaatgaaaatattctatatcttagttcttatgttttgtacttgtaaggacggtgtaaaatttattctccgattctaattgtcttctcgtctttttgtagaagttcaataaagtgattagaaaaaagaagtttaagtaattattctattgttttcagtaacctttgatttatttaatgttattggttttgaaagcatgtgaacttttttggaaaactctgacactcagctccactaaataaggataagtttaaaatctaatgtcaaaaaaaaatttttaacggttgttattgagaattataaattgcattttgttttttgtttatacttttataaagttagatagggaattaagaacatacatttagttttgataattaaaaaagaataccaatgtgtggtttagatggaacttgaaaggtgactcaataagcttaatgaaacgtgggtttgaatactgtgttctcccgacaaagtatatattgattagtaaaaaaattagttgtctcgaaatttaaacaatggctaagacctaatggaatatattaagatgatcatatcatgtattttttcaacactttgtaaagaatcgttttttatgaattttgtagaagactttatttttttcatacattctacgaaaaagatatatttggcaagccataagaaatgagaagtttggtgtgttcatgacttctacaatgtaccaagattcattaaaatccatctggagtttatggcttaattttttatgtacctaaattcctcagtattatttcatatagtggactaaatatttgatttgcttaaacatttaacacacgattattgataaattgaaaatcgcatattgtagactagatgaaattctttaagttaaacaaataagaattaggctttaaaaaaagaaaatattaatttcagaaaataaattactatttttccaaacagacaatatagatgactcagtaaaaatgagtgagtcatgtataagttcaaacaaagtaagtatccctaataagttagtgaagtgtgattgtttgctacgcctactattggctaagaggtttttaaggttctactaaattgttgatagtggtgtataagtcacttactaatacaacaagttggataattgattaagtttcagaaatatataaaaggacaacagtttggaatggttgagattagtttgtaacaattcttgtatataaaaaatataataatgaaaaaagagtcagtcaagcaataatgagtcaatgaataaaaaaataactctaatataatagcgtttctatattacctcgttattacccatctatccattcaatagttcaataattagtcatagtttataagttataatctatctatttaataaaaattatgttaaatcttagtcaaaacacttcatgttatataggtaagtggcctttagttttattaattagtcgggaaacgggagtaatatcacacagataatttattaataatcaaagatagtaattgatacaatcagcaagatgattattaatactgtctttgtacattaacggctatatcgaactgttggaaaatgaaagtttattactgtcattaccataagaattatttttaattagtttttctgtatattatgtggtgtgcggacgtaccgtaatatcaggaagacattttatttgtcaccaaatatgtttttcacagatttgaagagaaatgaaaatcttaaaagaatcaaagtaaataaaagaatttatactgtatacactatataataagtatatacatgtatttagtacaaaacaaaacatgaatctataacttaatgatgtctaccattaccatggatgctgaaggctccaaattccaacaaatatattagctcgataaaagcagctcaatatataagaccgttttagtaattatattatcgactatagttgattactgtttcgattatttgaataactgttaatattatttgcgattccccaaaatatacaaaagaagttaaccatctcatattatagcactctttgttgtagcacgtgtatggcttattaagacaataaatagttctagattccataagatcctgaatgaatctagaaccaattagtgtattagtaagccatacatgtgctacaacattagatgctgcataataaaaagattggattacataagaccttggcaaatctagaatttacctattgttttattaagtcccacgtgtattactaatcaccatgattagagaattgggatgcagttctaatccagtagtgcacctaaattaatataataaattttagggttgaatcagtcaagtcattaatgtagtaacctgaataatcgatcgagctccagaaaacatataaaaggacaacgttttctggagataaaagatcatcttccataaccgtttcttgtaaataatttatatattatatatgaaaaaaagagaacaacaagcaagtaacaagtcaagtaacttcgaataagtacattagctcgatataagccgcttaatatataagaccgttttagtaattatactatcgactatagttgattactgtctcgattatttgaattactattaatattatttgcgcttccctggaatacacaaagaacttcaccacaccatactacaacactcttaaaattaaggtggtttcgtggtctagttggttatggcatctgcttaacacgcagaacgtccccagttcgatcctgggcgaaatcaatttttgcagcccttgcaaaatttcaaactgcaatattctggctaaaaatttatattatgtgccatatgaaatcctggtgtcactataaacgatattatggactttttagttgacgatgatgttcttgtttttcttgttcatatacatatatgtgcctttatacctatatatgttggtttattcttcgtatagagtatagtttatgtatcatctatagccaacaactaagagtcatttgcctattttagtgttctagaggagtatacctctcgtaataggtcttcatctactatatttttcctcgcttttgcgcatccataacattatctagtcctttttatgatagcctcttaaaatatcgttatatctcataattctatatctaacaaataactctttttgtaatataataatatgttgtaaaagattttatagaatgaattagaaaaatatactacactcagatctaatagggtattgtatattattgatttaaactatttgtaataaaaagtatgatttgtcaaccatataataaagagaacgaaattaagaatttttttattcatcatatataattgcttattacccataattattgtgtaaggaacccaacttgaaatccagtagatacgcaattccgagggtaacacctgagtgtctgggtggaggattggtacagccatgtgcgcagcggctcctataaggtattgaatctgattgggggatttccagggagtgagaattatatcaaatcttgtcaagaggcctttgattactgagagatatgccaggggtaatcattttatttaaatacatcttagtaatgatattaagaagtaactcttaatatcatacaagactaagaagaacaacagcaagaagtaataatactacatcagggttattaattagtgatacatagagcttatgtaagagtgtttacacttatactaattgatatgatttatccatttacatacaacaactcttacatattgtcgatatagtagctcattacttcacacatcatgataaccttttttattttattttattacaaaagacattattttaaaattcatagagttctgtttaaatatgactgagtatttcaaaagagatatggttgtgtgttatgttgaataaattaatggaatttatatatccatctgagatgtgatatttttccttattttttgtataataaataaaatatgcaagaatgacctttttcttcaatgactgacttgtatattcttatgccctgtggatatttgttattgttaatactgtttcgttaatattaatgtatcaaaatgattctactacctgtatacttaaaatatatggtgagtatatcttcaatatttttcacagtataatataaatgagtaatatataaaccctgaatactgtttaaaaaggtggttatgacttggtaaacttaaagaataagatacatgatgatatatacatctcactccttagaacttcttcatgaaactcattttattacacagtttatcaatgttaaaaaatcattcttatgtgagttaattctttttggtagaacagttcttaaattgtcccaaatttttctggtgaaataattaatacttagataatattttttaatactcttgtggactaatttgtgagttatacttcttgatggagtaatgatagttgattatctgttaataatacttaaaatacaaaaataagttaagagttcaaaaaatatttatcccagaccccccttttaatatatattcatgacccttctgatgcataataactaaaaaaaaaaagcgtaccgaataatttgttataacttggatatttaaataagcttattatatcttctgttttgcagtattaaatgaagcggcatttattagctatattttgatttgtctatataaaaacgtataaattgacatttcggatatcgctttgatgcttttaatagtaattgaagcataaagttttgatgtattatggttatttcacatacaatatattataggtgtccaggtctttcggtgagccatgtagattcctatactatattttgaaataaaaaagtaatttattggtctttaactgcaatcagtactgttatcagatatggatgaagtatacttaaacttccttacataaatttatgatataaaaataaaaatcaaaaaaaaaaaaaatctttgaaaatatataatattaattatcactatcctatatcatttatttaaaaagactatattaattatatatatatatatgtatagtaataactatggtagtgatataaaaatgcttttatagaattctaattataaataatatttttctgagctgttttacattaaaccacattttataagttatctgctacttttatattttacttcatataatgtaatataaaaattgatattatagatttggtcaccaatataagttattttaaggttattcgctttcttcctacagactaataatcaaggtagacgttataataagggaaaaattgtaatactttatttaggctattatatattcgtctagtaaagatgcattctttgtaatgtgaattttaccaaatgattgttcttggaccaaatctacgcatcctgtcgttgctagagttaacatattgaaaaaggcatcactggcttctcgttttgaaatagggttgctattttgatggattttggtatgttgttcgacaactaaatcattaaataaaattgaatcttctttcatctttaatgtttcaacaatatgattgattgtagggttaatattttcgctggtcggtagcttcatgtgttgatcgttatcgttgttactcacattattgttcttataaggactagaaagaatatcattatcgtccatatgctcctcagtattcaattggttagtaatatctgcatccaaaggagcaataatatctggctctaaatcctggtagggttctccgttacccaaggaattggcatctaaatctaatgaattatcatactcaggttcctcaataccttcatatgtgttatttgtaacttttggctttttcagattccgataatctagatattgtgtagttatgacattaggaatataatctaaactaccaatcatttgttcccacaatcttttttggtttaattttattattgaatgttttttaattactgcatgcttagacacaattgtcaaagattcgtttttcaactcttcatctgttaattcttgactgaagtcgctttcaactggaatggtgtgttttaataagggatttctggtagatgtgctttttttgctgctatgccttttttcattgttgacgatttcagtttctggttccaattccaattcagactgttctttttcaagttctaagtcaaatccaaagtcagttggttcatggatatccaccgattcagctcttcttccgagttcaatagaatcatgtgatatatcagtatccatatttatcccttcgttatttccaaaatctagattccaatcattatcatggtaatttgtattgccactattaatgttcatttccgaatgttcaactgtaggttctgtatttctagtaccttcaatccatgatgacttgtcctggatagaagtattttgaccattaacatcttgtatatcgaaatctagatcaagattggagttctcatggatattgggaccttcgttagaatcaaatcttctaccaacttcaatggatatatcaaaagaattatttggattagttgttttggtagctccttgaacttgacgttccatattatcaaacttgttcaataaatttgatgcagaagaaatattctcatctaaaaaacctagagtaggtaagacaagcacttccttttctgtgactgtatcttctaaaattaaatgaccaattttggcgatagtggcgttttctgtcatcgttacattaatttttgaagatgccttaaacaatgagctaatcttgattaatgtatctttaatatcagataaaagaaaacctgcttgtttagaatagacacgaactacaccatgtaataattcacctgaagtacgtaacgtaatattattaattgaagcatgccctttatctttttctaaaattgaattgtttctattttctaaattgtaacctacgactttttcgattgctcgaacagatttacttatatcagtttgtaaaaccgatgttcgagaaacattggacatatttgaagcaagccatatttgggccaaaggactttgattattagccatgttcaacattatgcttggttgttgtgtgtccattttttttttggaaaagtcttaatcttgcaaaattatctatataattattttttttattggtgagatagcaaagttataaaaagaaatttagatagcaaatagaagtattatgtattttttttttttactttttttttgttaaaagattgtattggtttatatttatttatgttctagcttaggttgttttatgatgtcttgtagcttttgatatcatctacaagagcatgtgtaagtttaaatctaaatctatttatgtttattcttaaatttcaccatgttaacgtgtcgttaacaaaaaaatattgaaaatttaaaaatttcgcgtcaagaaatttcgatgtttacttttttttttggtgaggaaaaaaaattgaaaaagttgtaacacataaaaggttttcgcctctttacaaatgtgacggttattgaatttgtaaagtctataacgaaaagaggtatttgtaagctgtcaagagtctatgacgagtttaatttaattatttagaaataaattggagtaggaaatagcaaaaatgaagggagagtatttcaaaaagatctctgaagagacttttattgtcgtattatctacaaaagtgtatggttatttgttattgcctgggtatatcatgtaaaagattctaatacattttatgccttcaagtggatattttcagagagaaaggagaatagggtaaatattttgctcagtactcttttaacctcgttttttaaaaagtgtatgaaatgaatatcccttcaagttgttagaaaagctataatgactctatatctaagttcctcaaaatgtacagctaccaatataagggaatagttaaaataaaaagttagtaaactatgacagtttatttgaaatattatgacctatagtaaattattgcacttaaggtatatataactacatagttctaatatccaaaggtattttagtaaggcctctcaccttgtaaggttggactttctattgtacaaaatatgttgagatagtcatgttctattaatgttctttttgtttatagttccaaaaacttactatctagatttaatctaatatactgattaaaggtcacgcttgttatagtatctatagtatatgcatacagtatctgctccttgcccaatggaaaatttacagactaaaaacttgctacaaaaaagatcgtgtatttatttattgttatatgaatagaatagtatagaatataaaagaatatatgtatttatatatatataagaataaagacggatacccacttagtatccataagaataactcactttaaggcattttgtagttcttctaaaacgttaacttgaagtttggcaatggcagaaaccttttcatcttgagatgtagccttttccttagccttacttaataattgggcaatattttcctgagaaaaagattctaaaggaaacgcttctaccgcagtaacacaaagtaatgaatttggttgcattgtagcaaatccacctgggataaaaaatttcttagatgtttttccatcttctaaaacttcaactacacctggtgttaattgctctacagtaggaatatggttagctaaaacaccaattttaccactttgggccggaagattcacttgagtaaccaaagtatctttgtacagagtctcatgtggtaaagcaaagttcaactttaatccaccagcaatggacgttgcttcagcagcattagcataggaacgtgtaactattctcgaagacttaattaattgtgaacgaaacataattataatatactttgactaatcagaaacaaaaaaaagagaatattgtgttagaagtattatagtaaatattagagataatatttcagggctctcttttctaatggtgttgataaaatgtttgtatataaagtttagatacacttttcattatcttataacaaggaattatacctctttaaaacactgcaacgatgactctccttttatttttcctgtcagcttctcttcttttttttatgcctttatttgaattgtacttttatttttaaatttttctaaatatgtgaaaaaaaagagaaaaatttcaattcactctattggctagacaataagagattatcaaaaaatgttaaagagaattgaatattgcttgaaaagtggttcactcgatattccagaacaactatcctgctgtgtgatgttcattcagatagtctaagcatgtaaacaccatatatatcataaaatgtgttagaaatctgtctaaactttttctgttgtatcagattgtgtcaatagtcagaggagcgtaggacagtggctgttgcagcatctaggatggtcttttatacacactattttttattgtcgacttaaaaacaaaccatcatgagttaaatgtttagtaatataggatagactttgaagatacaaaagtctactgctccagggaaacagaagaattaagagaaatagtacagcattcactacaaaaatgtacacactcttgttacgctttctgacttagtaattttttataaaaaatatagactaaattacatatgaacgattattggctgacacacaagtcgtgtaaagcctcaaacaatgatggaatgtgccgaattttgtcaaataacaaaatggaatatcagcaataagtggtcaatttatatatcataattagccatgtaactcctatacttcaatacacttgtattatagattgcacctttataattgatatggcattggctctaaacttatttatctatctctaaagttaatggatttaaataaaaacatagaccatgtattattatatttgtatacgatacctgaaactagttgtcacccaagacacgtaaatcataattcttgagatgctttggtaggtttgacagatttctttggcaataaattttggtggatgtttggtaacacaccaccttgtgcaatagtgacattacccaataacttgtttaattcgtcatcgtttctgattgctagttgcaaatgtcttgggatgattctggtctttttgttatctctggcagcattaccagctaattctaaaatttctgcagctaaatattctaaaacagcagttaagtaaacaggtgcaccagaaccaattctttgagcataattcccccttcttagtaatctgtgaactctaccaactggaaaagttaaaccagctttagcagacctggattgagaagctttagcagcagaaccagctttaccacctttaccaccggacatgtttagaattcactgtaatgtttataggttttgttgatagttgaatatataattgatatttcttggtgtaagaagtggacaattggcagaaatttttacggacgctatataccaagtgagagaaaaaataaacacaagatgcaaaaccggaaaggtagcttccatacagttcaagttagatctcttttataggattttgtatagcatattttcatgatatgatccagatattaacaaatgtaaactgctggtagaacttgccttggttgtaatatgcagtaaacaatgaaagagaaagttgcttcaaactttgttgataagagcaaacacatgaaaccactctttaactttgaatagtaccttgtgctgaaaatttcactgcaataacattccagcctacgatattctagtacaactttttgtcctttccaaccattaagagtataagttttcaccttttaaaaccatgtactgaaaatttctccaaatatccgaatttttcagcactaactaaaattaaaaaagtaaaaatttcgtgtcaatttttttgttcctgaaatttcgctttgccccttttttttttgtttatgctcgcctaatgttttgttaaaacaatacagtcaccaatttttgggtctggtaaaggcattgctatttctaagttgttagcattgataaaaatatatacttatgtatatttgtaaattcataattcattatgcaagatatacccaaaattgttgcgtatataaagtcaaggttgtactttaggttttattgaatattttcgttcgttttcttttttctgcacgtgtatgactgtagaactgatcgtctgttaatcaacgttggttgagacttcaaatctacattaattagcacgtttatctttatttgatttctctctgatatagaaagtaaccatctattaagtggataagcatttattagaaacagttccaatacagttaaagatatgtctgaaaacaaagtcgcctctaaagctccagctgaaaaaaagccagctgctaagaagacttctacttccactgacgttaagaagaagtctaaagttagaaaagaaacatattcttcttacatttacaaagttttaaagcagactcatccagacactggtatctctcagaagtctatgtctattttaaactcttttgttaatgatatctttgaaagaattgctaccgaggcatctaagttagccgcttataacaaaaagtctactatttctgctagagaaatccaaactgctgttagattaatattaccaggtgaattggctaaacacgctgtttctgaaggtactagagctgtaaccaaatactcttcctctacccaggcctgaataagataatattctgtatctaattatgaaaatatgtcgaaaagaaagcattaaaaataggtaatttttaagcatgtaaatgtaatattcaatataatgtttttgagagtaaaaatttaccctctttagttccatatgcatttgattgtcgttttactcgcttatatatttttgcaatctgtgtttctgggccagtgcattagataatatattaattgtgtattatatatatacatatagtatggttgtagttatcactttaaaaaaataaagatgtttatttccatatttttctttctattgtcacgtttatttagaaaggcgacttaataacttgatgctgtattttctaaaaagctttgtttataataattaattctttttgctatatttattaatgatttataaaaatattattttgtattattaaatctgtgttgagaaaaaaaaattaacatatttaatgagaacaatttataacaaactttggttatttattgatgtttttttttgtcaacggtaaaggcagttaaataaatactaccaattttttattcttattaaacttattaaagcattgaatattgattttaagcttgaaacaacttttttttgctaaaaccaggaaaaaaaaaggatgtatttaatgtatattggactattgattttttttactgccaatcctcttatggctttaaataccaatgaatgtacatacaatagtactaagctacaactagtgaatttactcagcaatttttcaaataatatatacaaaaacaacatttccataatagaaaatcaactagaagaatgttataatttatataaatattcttcctctaacagtctcttttttctggaaaagttattaaaggataaaataaataatataacagctacagacactttagatattagaattcatataaagtcactcaataaaggtttaacatatgccattaatgtaaaaccatacttttttaaaagagaagctttatcaattcttattaagaatctcaatacaaacttaaataatttattaagtatatttcagaaaacatcagttcacgcttataaagaagaagggacaattattcagtcaatagaatcttttacatccacttctacacatccaaaattacaaaagattttaaaggattctatcattctatttattctttttggttcaatagctgatgtttgtgttgttccacatatgacaatatgtcctatgatagttttagttggattaatatcaagtgccctttggatgtttcaaataaatgatatattcaatggcatatttttgtgagagtttctataggttaatggataaataatattaaccagtataggtataaacacttttacttaggttctatataacattaaataataacaatactgttttattattaacttgttattatgttattgtattttaaataatattaaaagttacttctagtatgtctcttaatcatttattgttgcaagatctcagtacaaatatttcatttaaatttattataaaatcaatacaatgaaatgatataaaattatattaggaagctggtgttattcttaagtttttagtttattcatggtaaaatgttagtcatactacaactttatattatatgctttgtgttttttaatttatatatctattcaaagtataataaataatgtacagtattttatatttgagtcttcttcaatataattttttattgatttttagttatttgttataatgaatctagatcattaataatatatttaatcatattttaacaccattaaaaaatttttgaataaaatttgatgtaagtactattccctagaaatctactaagtagccttggggttctatactaaacattgttaacgaaattgtatcaatccttcgtttagatattttcgtgctagttacaggattgtttttccacttgatcccagttggatcacttgtagttttaataaataaacaattgaaacattttttttttaaaggattttaatgttttccaacgaattaataatatctagctacttataaaaaaatatcattcgaagacaataaatgtatgttttattataaaacaaaattaaagtatccctaaaacagattccaactgtgacagtataatctacaatctgctttatttcatcatttatgtaacaattttatgtgttttgcaaaattatttcttccacaatacaaaacttgttccagagaacaaacaaattcttatatctttacacagataatgcacaagtttcaaaaataacaatatactaactctataaatacattaagccacaattctataattagaaattctatatgttaaaatcttaaatgttcttcaaagccatgaaatacataatggaataaatttcgcagcctgttactttatttatatatacatatatacatatatacatattataagcaagaaaaaagaataacagaaaacatatataatatttcactcaattaaattattcccctatgtgttcaaaaagtacctaatgtaacctaaaacaaatcattagtcaaattattattgagtttacctgtatcttatcacaacaaatataaaataatgtacctaagacatcaactcgtccacttttgattttacatatgatctctacttctataaaagctattgtttttaccatttttgaggcttttatctcccgagatgttaaagaaaacaatatattattactgatttcccaacatatctagataaatatatcacaaatttaacaaatatctatttaaatgttgtatatgattacatactatgcttataactacatttgaactgttttttcttgctgtcattctccttctaaagatattttattttctttttatctttattttgtccactatattaatgaaagattcaatattcactacaacttaatacaatgcactaaaccttcaacatgccataatttaactattgatctaaaataaaactttgttttctcctcagattctaatcctttttcatcacaccaaaagcttagtattactattactaatgataaaaactctcttagtaacttataacatgtatgtgtgaaacattatgaaatcaatatctacttctccttatttaaaaatctagacttactttcttctatttacgaacttatcaaataatgtgtttttttgtaccatcttttaaaaataattacctgtagcctttcaacttcaacaaaaagctcacttttcttcttttggaagctaaaaagtatttttaataagagcttacaatgagagtatgttttgtaacaaataattacaaaagttttctaaaaaaaatgatattcaacaccaattaatcgtcttacagcatagctaacaaaataataattacaaatgtgcacaatattccattcaaaaaaaggagctcatttaatagtaatcatgcatatctaatatatataatcatagaatcttatttatattgtctatttatcgatctgtatcttatctatttgatacaagaatcaaatgccttataataagtaatatgaagtcacaaaaaatgctattaattccaaccatctatatactttttcttgtgctgcctacatcactctatttttttttttttttttttaataaaaatgacaaacaaatctttgctttggtatattatggttgttgtgctttaaaatataacatttacagattttatcttcctgctattaataaagcttttgttgctaataatatgttttaataaaatacttcaactaacacaaaaagctaaccgaaattataataaccaagaccatttacttaatacacaaaataatgtttctctatacaccacctattgctaattcaatagaggtaagttatatctccacttcccttttccaaaatgtttcacctaatcctaattttctcaacaatggtaattttcctgtctaccaataattcttttttcaatatcaccaaaccttaatactataatacctacattttttccaattcatattcaagctacaataccatcattaaaaacctacaattcaaattaaaccaataaaatttcttcattttccttatcatctatccatctttctcaaatcaatcataagcctctacctgattactagcattgacattccctgcatacctgtcaaaattttattcatatattgtcgtctcaccgtctttatttttagataatccaatttctttttcttcatattcttttatcgatatttcacctacaacttaagggcatgtgtctgaattttattttagaaagtaatccatacattatgatagttcgttgcctatctgtgaaacatcgcggaaagacaaaatcagtggttgttttctttgaattaatttttaatcttggtaaccttaaaaacgttaaatatacaatcttatatgatacaagcaaagtaaacaaaatttctttttataaaatgtattttttaaatctttctttttttatttcaattatgtttttttataaaaaataaatgcgtgtgaattacatcacacatcgtgacagattattccaaaataagccgtttttctttgcagcatgtcaatggccattttcacgaagcttgatttttccaaggatgtattcgaagatactattactagataaatttaaaacatgattattattcatgtttaagagcagaattactagtttcacttcgtcatttatgatgaatattttaccatatagggaaatttaacaaaatagattatgttccaattttgtaaatagtaaaaaaatttattaaatatattgtaatatcatttaacacgttaaagataaaaaatataatatctcggaaataaaaaataaaaataaattatgttaacatgtttttaaaattatataattattatttgttcatgtgattaaatataatcgtatattaagatattaatattttgttataaagtatttcatgtctcactattacttgttataatataatgtacattctctaatcttttctttcgtgaaagaaagattgtcatttgaaaataaaagcataagtattgcaaagggcacttgtaggtacattatatatcattatgaaattttgtgtgatatagataatactaataaattcttttgcaatggacgatgataatacccatgttaataagtatttctaacctcaactaaaagttattaataaatcattcctacttatacactcattgatttcttgaactccaataataaataaaacctaaaaaagaatacataaaacacattttataaaaagaaatttgttcctttatttatactctgaaaaattgtatatatggcttatcctctataaataataataatcaatgattcatatactttatgtaatactaacaaatatactctatagtttcagaatagatacccctaatgttagaaaagaacttagattattacaaaatataggccttaattatagcacgtccaaatttattaatattttaaaagattcatcaaactgttccctttagagaaataattttgaacactctctgctttcatatttttaactactcaataattacttattaactaaaattaaaattaataatgattttaatagtaatgttgagatattacccagactcaatgaaaattttgtaaaaaactttttgttctcaaaattaactttctgaaaagtataaatagtcaagctataaaaattagaaataatttcttttactcacaactttatatacgaaatgcatagttttgtatataatatatctattttttaatactgtgagtgattacttgtaaaaatacggttcatacagttccattataacttataagttattactccacatcttttaaatttcaacaagtaataaaagttctatttctcatattattaagcatactattaaaaagtatataattagattaagagtttaactaacatctttattaaatacactattgtggaaattttatgataatacgaaaaatcaacttgaaaacttcatttgaaaattttaccaaatttacagaagtaaatctctctgaaaataacatcatcaaattaccaaaatgcattttaaacttacctaagtatctcattttttaaaatttatacctaattaataaaatgatttgaacagactagaataaaagttttaaaaaaaattatataaaaagtgaaattggttttagtaacttctgtaacaaatttcaacttttttaataaaaaaactacttctaaagttcagatttactcttaaatcaaaaaccaaaattaagacaaaaaagaatagcagtaaaagtttttatccagatgataaagatagtcattaaaaggataattgctaaagagggagatatttaactggtaagattatcagttaatttttaggaaaaactaaaagtttattgagaggaaatacttgactttgctaagacatctattaacatcaaccctggcaatgacgacaacaatatttggtaccgagaaagtaggtgtaccttatatattgaatgtagtatgaaattcttcgagagatttcaaataaaagtatagttcaaaggtaactagtctaactacttttattaattctaaaggaaaaaatggacaagaaaccccaaatatatctctatttaacacttatctaccccgttttatctatgcaatttatgctaacaatgttacttgtttaacaccactaagatctgtagtatttaaacatattggaatgataaataaattgtcggtaaattttttaaaggatatttcattgtagactattgacttttcataaatcttatgactgcaaaatacaaataaatttaaaatttcttccgttcaaaaatacgattttggaaatatttagtataccaaaatatgtcatcctaatctagctatttattaaattattgcaaaaatagtatgtctgtaacctatatccatcaataataacttattgtacctaacttgagctctatctaaaaataaaagtatcaaagatcacatgtctaacagcaaaatatatgcctttcttggataaattcaggcagatatatcaagtgtttttttagtataattataactatctatgttctttccagaattcactcacattttccaaaatattggataatatatacattgaaaaaatataactcctattggccaatatactaaaacaagtaataaaaaacgtattttattagcaaaagtatatcaacagacttttctttaataaaaagtattttatatacacctatttatttttttctcaaaaaataaaagaaataatccaggctaaatcattttatttttattataaaattttttaaattattatcagatattttattgacaacgacatattagtttgctttcaaaaaaagaagctaatttgtccaaaaaaattaaagaaattaattttttacaaacaaccttaatcacatcagaattatctgacttagcaccaattttaatgctaacagtagtattatcagcaattaatttctttggggtaggtaatgtgacgaagactgttgaattttctttttaatcttttctaagacagagtatttaataaagtataacaataaaattcttacatgtttaatgtttctagagtgaacctaggaaatatctaaagtatccacaagaaaagcctaggaagtgtttctggcataatctataacatctttgacttcattttcatcaccagaaaaggagacaaattcgtctttaatatcagttgggaaagtaaacatgatattatatttttctttaattccatcagtgttaattaagaattagaacttttttggaatcttgacttttgtgttaaaaatctttattattcaaaacaatactaatattattttattgaatgaaaaatttgaaattgtgcttacttcaaaccaaatatcacttcaaataccaacatacttagtaaactcacaagaataacatcaatcacatgacactaataaacaggatcattagtcactgtgtaataattataatgcaatatgctttttccacatgtattatatatatatgttttcgtatatgtcgtacactatacaagaacattataggtttccttttactgtgctttctatcgtaaattgtaacataacaaactgtaataaaatgaacaatacatagtgaatttatatcttcctatatatacgtaaaaaacaaatttaaataattaatagaatatatatcgtttcaagcagatgctttgaataattaatgattatcatttattataattaatatctaaccttatagaccataagcagatttctcacttggttttaaactcttaaagaatggttggggaggaatacaggctcccaaagcccttctagcatgactattcatatatttcaatcctagtaaataacttgtattaacccatccaaaaccttctttggccacacctttaaagtctgcaccttgattaccatattctgcctcaacacgatgtggatcagtacctcttgttacgtcgtatttctccactacaataccattatagtcaacaaaggcttttgtcatcatatatagccacctataagccaagcgtgtagcaacatctctgaaactatattttgataatccttcccaagccaatatctgatgtggagcccatccaaatggataatcccattgtcttataggcctatttatggaaataggacctcttgagctttcagtacaggcaacaataccaccgagcatttctagtttgggaagggctttttcgaccattaatgaagcttgcttctgagttgcaagcccagcccacaaagaccagaatgttgttgcagattcatacgaagttctcttttttgttttcacgttgtaatcaaaaaagaaaccagattcttcatcccacatgtacttattgattctattttttctttttttagccaaatctaaccaatcttccgatgtagatatggaaccatcatgtggatcaacaaacttattatcaaaatagtttttaattacatctgcaatgtcgatctcatatttatataacaaggaattcaaatcaattgtagcaagataggcacaaacacctccaaatctatatgttgtatcatgtcctgactctctaactgctctgtcatgtaagaaaaattcatcaagagctagttcattaatttgcccattgttgtacatgtctctaatctcttgtaaagaacaattatattttttggcataggggaataatatagtatcaaaatgatccggttcagtttcaggtggaataccgataccatcagggtggtaacatgataattttgttacaggatccaatcttggttcagctgtccaaacagttttatattcttttattgctgcaataaatgcccttttcaataaatctatagcattgggattgctactaccaccaagtttttcaaatactttcaatgccatatcagttaaaaagggaggttgtgatctacatagataataacttctattggcgtttaaaattttaccataatgttgaatttcaaatataaaatgttccaccatgccttttgcaacatcgattttattactttctagtaaccctaatgccattaaataggaatcccatccgtatagttcattgaatcggcctccaggtacagcatacggatatcctattaaagacttttcacctgtagatggattaacatgttcctccatggctagtgctaacaatcctggagttctatttagagatttgacatattctggtgtcactttttttggcaaatactccacttccagcttcattgagggattcagctgagatgcttggacaaaaaattcgtactggtctggacaattatgtgggacataaattcttggattttttgcttctggtgtatcaattttggtgtctgcagcaatgtcacctatattgaataaatctattcttctagttaaactgttccaaaactgatttgatataagccttgataatctattcacgggattttcattaattcttgcttcatctagaaaaatttggtgttttccaaagcttttggctatagttaattcttgtaaaagattagataacatataggttcctctgacgttaacatgtctgtaaccaaacgagtttgctgtacccaattttaaaacttttggtcctgtgtcttcaatagtgatttgataatttttatcagtatcttcgttacgcagtaattcttccaagattttatcaacgtcttcaatgaaaaattttctgtttcctttactagatgaatatgtatcatcttcagaaccacgtctctttaaatggtaatcatttaccaattcttttttaaaatcagatacattgtcaaaaacactcatagttcttgttctattcaatctccgaggggttgatttatcagtcatgcgattttcattcgtagcagtgagatcactcataagattggagccaaaggcattactagctgagttactatcgttgagagtggtaccatgaaaggtacctgtagtataatcattcttttttcttggatcagttactggaccataatatacttcagcatcagaaaatggatcagtatattcagataaagaagacaatcttctatgacgcctttttgactgactattcaaagtagtagtagtcgtagtagacgtaattggcacagatttggatgaaatagaatttggggaatcagaggaatcagatggtaacgattttgacgaagttgatatctcttgactgtgctttgctgcttgtatatgatcttttatttgggacattctaggttgttattttgaagtaaataaaaactataatagccacttaaaaaggggggttaatactccaatttttatctgtaatggctatccaaaaatgcaagcgtaagatattgtaagaaaccaggctagtgctaacagacttactgtcatggtaatagttatagttatagttataattgttgtatttgttcttgttcttgttcttgtgtacagcacacgatggctgatcacctcctgttccattccattcaattttgttaaggaatatgtatttctttttttttttttccttttattttttctttttcctccaattcttcttacttgcaaacaaccctaattcggaattttcagaagggggtatttagttttaaatcaaattgctttccgaaattgaaagaattttactgttttttctcggtttcttctctctgtttttttttttaattttttgttagcgtattaattgtatttattgttgtcgtcgggtttttgcaaaaaacccctttcggaattaaaactgggtaacaaattggtaatatttcccagtaccgcttcaaaaaagaaaaaggaaaaagagacaaaaaatttttttttctcatgtactgtgtttgacaagtttaaataaatagatcacattacaattaagattccagtaactagttaaaaggttgattggaaaacaattgagtattacatatatccctaacactatacatctcaataagtgtttgcaaaaaaaaaaaaaaaaaaaaagagagaaaaaatgtctgacgttactgaaaaaaaggaaacaaccactacaactactgaagctaaacctccaacttctgccgtcttttctatgtttggtggtaagaagcaagaaaaaaaggaaaaagatgaaggtacagatgataaacaagaagaatcaaatgacaagaagaaagatgaagacgaagcagagccagatgtccatttcgaaccggttgttcacttagaaaaggttgatgtaaaaactttggaggaagatgaaaccgttctttacaaagtcagagctaagttatttagattcgatccagaaaacaaagaatggaaggaaagaggtactggtgactgtaaatttttacaaaataaagaaaccaaaaaagttagattattgatgagaagagataaaactttaaaaatctgtgcaaatcatatgatcgccccagaatatgtcttaaaaccaaacattggttctgatagatcttgggtttatacgtgtacagctgatattgcagatggtgagccagaagcatttacttttgctattagatttggtaataaagaaaatgctgataatttcaaaaaagaattcgaaaaggctcaagaactaaacaaaaaatagattttaatacgtaataaaagaattattgaatatataagtatgtaatttttcttttaattgattaattgaatttttcaactgataggcgtatatttctttgtacatatctataaaagtttatatatgtgaagcgtatacatttgacaaacgcttttttttctttaagctggtggtaagaataatccaaaaagaactgtttgaatggacacccaaaaaaataaacatccaagatacagttttacccaaatcatttttgtattgttaaagttgacaccatttgcatttaagttgggtgattttttataatgagatatttgattattggtttttgctgatattagtgtttcggatatataccatagatgtaatggaataaaacttgaaaccctattgataatctgaacatgcgcaagaaataaaactataaaaagaaatataatagtaatagctaccaatggtataatagtgttgcatctatttggcgaattatgcagattaataatgaagtgatgtatcgacttaagaagtataatgaactgaggtattgctattatgaagtttggaatgttattcaatgtccagtagtttaagaaacctatattccagtattttgcttggataaaagaataaaatgactgttttgtaataaatggtatactttttagtatctgttcattacaccattcacctccagaggggcaaaatctattaaatggaatatagtaccaattatataccactgttaataacattatagttccagataataaagggagagctactatttgtctaattattgtggataaatcctcactaaatcgttttttcatgacaaaatattgcaatatggaaaggagatcataaatataaatgagtcctaataagacacaaatcggcctattcaatgcagccaaggtaaacagagggatagtccctaaataatatattgatgagtataatccaattttgaatttcatgatgttttgattggacacattttcatttctaactatagacttttctctaaaccacaaaccaagaaatataagaaagaatgagagcggttctgaataaattgaaataaaaaatcctgaaccactcgtaaagataaataatattgccgataatattgctacttttttagcatatactgtagtgtaggtagtaacaattgttttttcactatagattaagatagtgagatgataaataataataacacttaagaaatgcaaaatattttccacaaaaacagtaaactttagaataaaataaaagttttttgttgtaataggtgtgtttattacattcaacagaaatcttattaattgcacccataatctggaaaacatcaattcaaagtcaaattcaggatattttatcaatccactaactatgcctttgataaaaaaaatggaatcccacgataataatttattccataggcatttattacccatcttgtataatgatggatcttttgcaaaagtcacttttcttaaaaacaatatagtagatgtatcaaactgtacgctaggacttagccatattaaaacatattggtacaatcgaagtgttataaaaatgaaaaatagtttcagatatacttcataatgcttaaaccagacatattctttaggaatattgtttgtcatcttacagatattggccaaagtttgcagtgcgactaacagtcgcaaagtagtacaattgatgtaatgtgataatttttcataaaaattttcaactcttctgttagagagtaagctcttgtattaccatttatgaataacaaatatgtttgtattaatttttttgttacttaactatgatttgcatttttttttattctccgtgaaatactttgtgaaagatttataaaagttcggaatctacggaatataaaacttaacaattgtaacaacacgtgtaacattgaaaataaacattctcatagaatattgttattattttcttaaaaaatactgtgagactaattaaaagaaagaacaattaaagtatgttaatattgttttacttttagaagaagaaaaacttagcagtcttattcttttaaatatcattttttcagatgtgacagttatgttgtgatgattgatggttatcatattactcaatcaatggggacaacatttttataggattgaaattaacctaaagacaatgtttacttaagactctcaagttaagtgtgtttttataaagtcattttttaaaattaacggtcacggaatatttatcaaggatatgattatattaagaagaagtataattaagctagttttagaattcttcttatgagtgaatttaaaaaaaaaaaaaaatactgtgagattgaactttggtaagggaagatcaaattttgtttattacaatacttttttatttgtcagaaaaagagctagttattttctttagggtactatttgaggttcaataaatatttttacatttattttatacctctaatctttagaagactaattactattaatctttatcttctattttattgttttttgttcacccctatatgtatgtgaatatttgtatatgacaataatatgctttaacgtaatattttagaatatctagatttttgaagggtcaggatttttgaaattaataaagtgcagaatacagggaacaaaagaaaaggaggttaagaataatcaacaaataattatttttgatgaactttttaattgggtttaaaaaacaaatcattagtgtttgttacttaataaagtcttataggcatttatatagaattgtaattatattggtgatagtttaaaaatataaatgtgtaaaaaaaaatctttactggtaaaggtgagagtattttattaacatattactattctaagtaaattaattaagctttcctttccaaaagaaaaaaatagataaattggagatagatggaaagatttgaaaaccttttttgaatttttgtaatacgtgaatatttaaactgtctggagttctttaatgtttaaatattttatcatattcttttggttacagtatataataaataatagtgtaatagatggcctattcttaacatctcaaagtagttatcagaaagcaacacatacattaaaaacactaatagatatcccaactatagaagcttctcatttaggagatttacctgatattgttggatatgataggaagaattgtatcacaacaaatggtatcaatagaaataaaaaagtattgagagatgaaatattattggatgaaaaggaacaacttatcaacaggaaagattttcctttttcaagtaataatattacaaatgaaaataatatcagctcagtatcaactaatactagatggatatatggaggaattcttctaggactggtaggtatcttttttttatcccttataattagtgcattttgtaccaatatcaaaagattaaaaacgggaaggcggccagtatacggtacttcttggctaacaccaccctcttattggcaatctcaacatgattataatactaatacaggcgaagaacctgaagaatatgtacccacttactcagaaattccaaacgaaaatgtggatcttggtttttatgacgacagaggagaattccatctaagcagtcagaataatgaatatacctctcctaaacctacaagtgaacaaaattagcaattgttattggcttatatcaacagtaaaacgttaacaagatcttgtaactttaagggaggtaagttatatcaatatgccattatgaatttttcaaaatatttaattacttcaaataataacaataattttcaatttttaatgaaaccaagaaagttaaatctactagttatatatatatatattgcaaacccaagttagctgattcccctgcaaatagctttttatcactgaacgtttagttttttggatataatcagacattatcaatgtctctgtaacttattttatatacatgaaaatgtatttattttatggtttatctctggtttttagtaactaatttgtggttgttgcgaagcagattcaatacatattcaattttgcaactacaaaaactcaagacaaaaaaaaaagcatacttatatattttgacaaaactgttcctttgtctggaaaattatatagttgttattgttactggagtttaaaaaagatataatattgcgatggtggctgtttgcattttttttttagtattattagattttttcttttttttgcagatacattcttcaaaaatgtttaacattattgtgaaaagtttatgaaaacttttgaatttttgaaactatgtcaagtttaatgcattttgtatctgcaatattcatatcattgctctcgaaaatgtcattttgagaatttgttaacatatcattgtataacaaaatctggtcattttatactgttgtttgatctcggatcataaattccgacaaaaagcccactgtatgcacagccgcacatgattctatcattcctaaaagagaagttccttccttgacaatagaacatgtttatatctaaacttcagtgataagaataaggaagaggaaaatgggaaaatggacaaaacattgtttaccattaagggtcatttttatttcattcttcttgattgaaacctgtacgagaaatatttgtcttccagtaaactaatgactaaagacaaaaaaaaagagagagaaagaattagcaaatctttctcatcaaataatactttttttataccatattgtttatcaaagtgggaaaaacgatttgctaaaataaaaaaatccttatgatcctccaaaaattataaaagggaggagggaataatctaacaaaatattctgaatagtatcattgtgtgatctacttttatgatataaaaacaaaaagaaaagtttaaataccaatattccataggtattgatttgtgtatagttaataatatatttgggctttgataaatagaatagattaaattaatatggcagagactacttatttgttggagaacatccaaaataaggagttgattagaagaggtccatttattaatggtcattggttggaaaagagtgaaagtggtgaaacttttaatgtgaccgaccctgccaatggaaagattcttaatactttaccagatttatctcttaacgaggtggaacaggccattaaaggtgcccatgataccttttataacacttataaaaatacaacaccaagacaaagagcacaatggttacgtaccatacatgatttaatgttggaaaatgcagatgatttagccagaattattactttggaaaatggtaagtctttagcagatgctttatcagaagtaaaatatgctgcttcttatttcctttggtactcggaagaagctccgagacaatatggtgctacaatccaaccttctataagttcaaatagggtgttcactatcagacaacctatcggtgtttgtgcagtaatttgtccttggaatttcccaagtgcaatgatcacaagaaaagcagcagtggcattagctacagggtgtacagtggttgtcaaacctgatcatgaaacaccattgtcagctctagccttaggttacttaattgaaaaatctggtgttccttctggagcattcaatgttgtgattagtggcactaaaactgctaaacttggtactatgctgtgtgaatcaccattaattaaaaaattgactttcactggttctacaagagttggaaaaatattaatggcacaatcagcttctaatattaagaagttatcattagaattagggggtaatgcaccatttattgtttttaaggatgcagatattgaacatgctgtaaatcaacttctactttgcaaattcagaggattaggccaaacatgtgtctgtgccaatagaatatatgttcaggccgaaattttagaccaatttgtttctttattgaagagtaaagttgaacagtttaaaattggacatggcctttcaaagggaacgacccatggttgcttgatcaatacacaaactttagacaaagttgagtatcacaagaaagatgctattgaaaaaggtgcggctgtagtaacagagggaggtccacttccagaattgggtccaacattttataaaccatgtattttatcaaatgtcccatatagtgccgtggttgccaaggaagaaacatttggtccattatgtccaatcttcacctttaactctatggaagaagtaatcagagaagcaaatgataccgaatttggtttagcatcttatgtgttttctaaagatatcaatattattttccatatggctgaggctttggaagctggtatggtgtcctgtaatactggtatattttcagatgctgccattccatttggtggtataaaagaatctggttttggtagagaaggttcattatatggtattgaagattacactgttgtgaagactgtgaatattggtaatttataattttttagtgtttgatttgtatataatttttacttctttatcaatacattacagcaaaaaagtatataatcttaatatgacgagtactttgtgtactttaagaaattttgttaaattcttactaaagtttgtagtaatgtgaattttgtgaattttgtgatttctacttaatttagttatatactgttattattacattttgaattatatattagtcaatgaatactactgaatattaaatatcattttttgctaaattatcacctattctctgctgcttttaaatattttttttttataaatccaatcagatccaattaaattcgcacctcttttttctgcaattctaaaccaggcagcagcttttataacgtcttttttttcttctgatatttttatcaaaggaagttgatttggatgattgttcgcttatttctggttcttgagaccatattataccagataggcacatggagtcaacatgacccatggatgcagccttctctaaacactttaggcctttgtattcgtcaatattttgaataccatatccctttaaatatgcaataccacattcaaataatgctggaactaatggttcttctaacttagatggaatagactcattaatggttctttctagttggaatgggttgatttcaagattaaatacatcattatcccaggattttatcgaggttgccaactttatataatagaaagattgaatataatcgatctctactccgtagccatatcgtaaagccaacccatataaaagaaatgctgttttgttccctttctggcacgcttgtcttagtttcagagctgaggcatgtagatttcctgcttttctcatgtctatggcagtagagatcagtatcttgtcttttgaatataaatttccttggaagtgaccattttcttgaggtgaattggagggagaaacataattctggactgcagatttgtgtgtagaggaaactggagaacttagtactgattgggtcagaggtacaatgtggttaaaagcagaatttgatcttttgtgaataggacttgcaattccagttaaacttttatgagttggtgaaggtacttgccttgatctgctactgtttgtggttgggttgttattaacattgcacgtatgtttttttatgtcttgataactactttcttcatatacgtgtaagttgtttgattggggagaaagttgtggttgtggagaaaaaattagtttagatgaactttttgttttacgaatagatgtaacattattgtaatttgaagatgaaaattttaagtccaaatgttgattgaagcttttcccaggttcattattaaaatccttattgctattgttccttctaatttgttccggagaacttttgtttttattttttttcagtaaattctttaaagaacttaacgaattcttcttcttatgagattttgagaatatcaatggtggtttgctttcgttagtggggcttaagtttgggctggatagagtaaatgattcaacttttatattttgcaactcagagttagtagtctcatgtgttaatggactagataactgtagggaagcttttgaaaattgactatttgtactgatattacttttggtacttaaattttgtcttcttgaaaccataaggtttgtattgttttctgggatattttcaatgattaaatttctaatagaatcggtatcttcttccacaatatatgaatatcttgatgtattggagtaatgttgttcaactcttgattgtagagatttatcgttaaattttatattgctaagaatatttttaatcagtggatttgtggtattgtcattgttaataatatctatccttttagatgaagaatatgtgtataaaggaatatcattttggtttgtagatttgttgcgtatgctaatattattattaagcttgagtgaaggaaattgagaagctggtaagctgattatataggattcagttgtattttgtttaatgttttcttttgatgactctttgtttaattcaagtatctttatatcatcatggatagggtcagatagtcttatattatttagatctttattgtttgcatcagcattattattttctctcgttatttcttctagaaggatactttcgtcttcctttgagagatctaatttatctaacaaccgggaattagttaaaatagaatcaaaagatatgatactatttgatggtctaagattattttgtaatccatcgagaggtgaagatctaatattatgactgaacattgaaaaaagttagaatctattgtcttccacaccaattcacagtggatttatgtagagggaaatatgtatgaagaattaacaaaataatgaaggtacttaatttgacttactatggtgattattattttatattttttttgttgttagaaaaaattttttttgttattatcgtatttattgagtgcttgtttatatttttaagattttcaaaattactaattaaaaggaaatattctacggtttttagagaaaataaaacttgttacattaatattaacttactaatacgtagaaatacaggactaactgaaggagttagatcttttaaaagaaaagtatattcagttttttttgtagattataagtacaggttttacatgcttatgctgtgaaaattttaaaacacagttatattatagaaagatttaaagagattacaggtagttaaggaaatcgtattgatggtgcttttagttgcaaagttttagacttgattatatgttaagaattatttaaattagccaaaaacaagataagatattgtcaaataatagacagcaaagtgcgaaagaaaaggagtataatgaaaggaagaatttttgatcatatagttcctttgtagtagtaatattaatcttttttttctaatttattgtacttttaatggaatatggagtaaactctagccaaactttgctttaaaaaaaaataacttgttattaaataagaatgaatattctaaatcaaattttctatgcaaaaaaaggacggtagaagatagcttatttctaatatttaaaatgtggtaaataatatgaactaggttctatataggaacaatgcgtataaagaagtaggaaggaaataagaggtagaatttattttcaatttttttctgtgcagtttaagtagaaaatcaaataaaagctatgaaacgattaaaaaaagtatgtttaacattgattttatagggttttgatgggatatattgttattatgttaagaaagtacattgaaactaaaaagtaagagattccaaattgttttttaagagaagaataatttagatatttgttatatattaaatattatagatttccctttttttagatcgattatgtatttaacagtatttgttgtgcttcttttctttgttggtttcttgtactaatacttcgtgtgtaaaaaatttttattattttgtttttaagacattatgatttaacaaattaatgtttagttttcaaagtaattctaaaaaccaggaagtaaggttgaaaaataaacattttataaaaacttaaaaatatcttaaaaatcttacccaaagataacagttttgggaagaaaatgactttcccaaataaaattactcttcctatatcaatgtaataaaactactggttacaattaacatgtttttcattttcacataatttactcacttcatgctttaataatatttacaagaataaaaattaaaattattgatgcaaagattcagtctcaaaaactttattaaacttcagcataaacctaatacagtaaaaatatataaacttaaaataaaatattaataatattataagttttctataacatttataataaattgttaataatactataatatttccatatattgcttgattttttctattctacgcaactaacatataagttataatgtaccacataagtcattttacagttgagttttctttagatacaatgttttatatctttttagttatttactacgataaagttagatcatcaaagatacccctaataatatttccagaattgtttaataaaaacaaaaataaactaaagaaataatcataattcatattcttgagaatttctttcttattataattttccacactatgaaaaaaaaaagttttcaactccttcatattacaaatttttacataaaattgttattaatatttttaattttatattaatattattgtttcctctctcaacacaacttcggcttacctttacacacacaaacaattccagataataactaattatatcttacacagtaaaataagacgccaaaaaaacgaaaatttaaacttcttgatgacatgtattataatacaaactaatatttgacgtgaatattggactatatgaaagtatataaatgtgcttttatatttttttaatatattttattagtgattgattgattgaatataaatagtttttttcctatttcattccaaactaaatcggagtaaatgagatgaataaatgatattagggctacagtaagaaaacaaagagaaatttaaaattaaccaccaaaaccatataaggttctaccttgtctcttcaaagcatagacaacatctaaggaagtaacagtctttctcttagcgtgttctgtgtaagtaacagcgtctctaataacagactctaagaaggactttaggacagctctaacttcttcgtaaatcaaaccagagatacgtttaacaccacctcttctagctaatcttctaatagctggcttagtaataccttgaatattatctctaagaatctttctgtgtctcttagcaccacctttacctaaacctttaccacctttacctctaccagacattgttaattatgtatattatatttgtaatagcttgttttgcttacttgtttactgaccaacaggaaaaataggaagacaaacagcactaagagagaaaagaaaaacagttcaaacagacaaaactcccagaaggaatttgaacgaaatgtatgcctttatataactatctaattcatcaattcagctgtctttaattttacccaagttgggatttaattttctccattattgtttacaaggagcgaatccattatatgtatttttcccatctgaccataataaaaacacttattttattaaataacgaaatgattaccgaacatgaggcgaaattttcagactgaattaactatggtcagtggggcgaaattttcagtacgcgcacgactattgattttttcaaaaaacaaacaaagctatcggacccaaaatttcgtagactgaccatagctaattcagtctgaaaatttcgccctactttagtgtagctttttaactgttaacagaattagaaaaaatattatgaacattcgtctctttttcattttcagccctcaattttgtaacataatgttctattattacgagtattaaattttttaattattgtaataatcacgggtaaaaagtttgttaacttcttttgttttattttcgttctatagggtgtttgcgtcgtgtttgaaaaacaactctagctattgaatggaatgttggagaaaacttctttctgcatatataaacagactattttcttctcacttctgggtgttctatgctgaaggttctcctactcctgaaactctttcttgatctaagacaaaagagaacatatatactgtcaacaaacaagacacgcatatacacaaatacataaaatggctagaactaagcaaactgctagaaagtctaccggtggtaaggctccaagaaaacaattagcttccaaggctgctagaaaatccgctccatctactggtggtgtcaaaaagccacacagatataagccaggtactgtcgctttaagagaaatcagaagattccaaaaatctactgaattattgatcagaaaattacctttccaaagattggtcagggaaattgctcaagatttcaagactgatttaagattccaatcttctgctattggtgctttacaagaatctgttgaagcctacttagtctccttattcgaagacactaacttggctgctatccatgctaagagagtcaccatccaaaagaaggatatcaaattagctagaagattaagaggtgaaagatcataaatgctttcttagatagacaaacaaacgtatttctgcaatgtactcatagtttctgatataatcatgtacgggccacatcattcacatttctagattctattaaatgatacttttatttatgtaatattcttaagtcattctttacttatataataataatacacatcatataatattaaaatataaaagtttaacgtaacgtttctgtaattttattttgtttgttctacgctgtttgtttatttttcatgtgtttttctcttggctttattttaaagttaattatgtgtgtatttttttttttgtaaatacacaccaatagtatgagtttaccaaattacaacaagaaaagtgctgcaaagacaaacaacactcagaatgaagataatcaaagtgtgtgggataaaatccttagaagatgcacaagttgctgtattaaatggagccactcatatcggtattatatgtgtaccaaatagaaaaagaaccatttcgtcagacgaagcgataaaaatctctgactggattcatttacaagctaacaataataatgttaaactggttggtgtatttcaaaatcagccaataaaagatgttaaagagctatctgttaaatataacttagatataatccagttacatggcgaagaagactggttagaatattctgattcaataaagaaaccacttataaaaagatgtgtcttcccacaagattgtgaaaaagtcttaactattactaggtcagaaaattcccaaaaaattttaccactctttgattctgctataggtggtactggtgaacttttagactgggatgaaatcaataaatgggctaagaaacaggatccaaacgaagtatcctttatattagcaggcggattaacccctgaaaatgttagtagtgcgtttaagctttatggtgttattggtgtagatgtgtctggtggtgttgaaactgatggaatcaaagatcattctaaaataaaacaatttatcaaaaatgccattttatcataaggtactatattgtcttaaatttataccttcaaatccagtgatacaaaaaatactatgatagtaaataaaaaagaactatttaataattgtatagcctattccatctatcattttaagaagtttcaaaattaatttttatgaaagctatttttttggttatcaattattcccatttaaattaacgctatctttaatgatatatttaatacatagaaactataaatgtgtcaaaatacaaaacaaaatataaacagcataacataacttagagaagaaaattaataaaccatacaagaacacttcttatccgaaacaatatgttctaatagattttattactgcatattggaaaaatagacgaccttaataaagcctaaatatttatttgtgttttatatatgcttatatatatccatttaattgattaaatgccggtaacacatctctagttgaaccgtattgaaatcaaatttttaagatttactaacatactatgttttcaaacagaacaacaatccaaaatactacataggataaaatttcttctatctcctttatgagaagagattaaaacataattagtagaagttgtttggaccatcaataaacgctcttaaaatattatactctgtaatatttaactgcattcaggaaatgagacgtgggcgataattaaaaaaaacgtctcattatacagaatcaacataatctttaaattacaactaaaatactagtacattaataagtaaaaccatttttgtagagttttctgccactaaaactagtcaacagataataatcttcatataattataagttgtaaaaggtcctcttattcggatatacctttcgtttcgtacttgttagaaaaattaaatttgcaaaaaaaaaaaaacagacgataaaaaaaaccaacttttaaagatctatatatatatatatgtatatagatattaaatatattttaacattcaccattttgtttttacatatagcacgcatgtatttaaagatatgggatctttattgaaccttaaaataataaccaactatgttaagacggccagccacaaccctgacactttcaaaggaagaagtaacagatttaataagtcatctacaagaaaaaacactagaagaaagactaaaaactagaataccgaaacagctatccgaatctactaatgaaaattctaaatttaatgctagaaaaaaagaaaatgagaaaggtgtacctgtaggactttggaaaaacagccctttaaaatcagcacctcactcaactagattgttagatcaattgaatattagttcattagagaatcacccagaactgcagaatttagcagagagtagtgcttctcaagaagaaaatccattttatcagccagaacaacgttagattagtgatatattgattgttataaaaaattcccagtatgaatatataattacaaaaaaagagtatgcataagtaaaagaattttcatacaaattttttaagtagaacactcgaattttttaaccataagaaaaatttttattaatattacatttgttcatacgataaaaaatgcaagtacatttcgtctaataatttttacgtacaatgaaagagttaataaaaggtgccaatttaccactgtattttttcaattacctagtaagcgggcgtgataaattggaaatttattactaatacatattaattaaaaagtcctattgaaaataatccatatattttcgtcggttatttgaataatactcttttgagtgaattttttatgcacaagtgacacttctattttatattttctatacaaagagactacaaccaaaaattttggcaatacttcaaataattatttttttaacaaagtaatacctaaagaaatgaactaaatcaataatatctttaacttgccagatcttctatttatatatatatatgcaactaaaaacaattatacttgtacataaattcaattggttttcatcattgtcttttaaaatttgtataagaacagacaataaaatactgactacgtttcaaaaaagagcagaatatagatatgtgtgtgtgtaatatagaccaataaatagatcaaccacctcttatttcataaaaatcagtaatacatcaagtactttttttatagttctttacaagattgaactttcacatataactttatccattattaaggtgtttatacactatttttaacttgtatgatatacattatgaatcacaataatactaccattaatagattggggaaattgtaaaactattaagtaaaaaataaatagttatttttgaaccttgaaatgatatgcagtaatagacactagtttgcttaccaaatctcgtttaaaatataccctaatacataaactacaagattttaaactaaaaaaattggtagtttaataaaaaatattaagtcatgcacaaattcaaaatcaataataaaaatgtatgaagccatcttgacccaacactttttcaagtagataaaaaattaaattatcatgtctaaaatgctgcaattcaacacagttaaaaacactcaagtattttgtttttatctcggggtatttaggctaaactctatattttcaatagcacctgttttgtcatatcatgtttttttaatcacttcttatgacttaatcaaaaaaattttttaaagaatataaaatttgtgtatttgattcatcacacaacaccattttaaaaaagaagaaaaaataaattcttaagaaaaaaaactaatttaaaaaagagtaaaaagtgaatgataatgaaatatatatacaataataaccattatataattgcataggttgtttgtataaatcattaagaatcgagaaaaacaacagacaaacaacagattttttaaaatgttttttgtgaaaaatttttgatcgtatttaccaaagccgtgtattacttaacaaaaaatgaaaaggtaaaaaaacaaattataatttaaattttctcttactagataatattttagcttggattccttgaaataaaacagtttataaacattaataatatctttatatatgctaaataactactaaatagttgctaaattagatacgaatttacagattctctatctgctaactttttgtaattattttaaaattaaagctctaaaaaagaatgtttacttcacacacataaattattaaaggaaaacttttgtaaaatacaacttattagttacaatctattgttcatttaaaacagttatgtatcgattggaatattttagtagaataaacaatccacaatatttaatttacttattttactaaaaatttccaaagcaaaagttaaaccaaataattataacatattacaacctaccatgtctaatattgaatatataaattacctaaaatagccctgtaattttaataataacacacttgaattaccatttaattttttatataaagatcaaataagagtgtttatatttacactaatcttaacataacccgtctttttatttgtgaaaactcttaaatattgacaattacacctagtaacaaaatataaacaacaactttctatgttactgtaaaggtttagtatcaaaaactctattaaatttattataataaaatatacatatctaggacagaataacagttaagagcttctatggccaagttggtaaggcgccacactagtaatgtggagatcatcggttcgaatccgattggaagcataaactttgctgatctttttataagatgtaataatgcgataacttgtagattgtgtgtttctggtaacagttagccttgttgaaatcacaatatacttcacttggatagatataagatatcgactactctttctatgtctctagatgtaatgttcccatatatctatatccctaatttacaataacctaatagtatacacttatatactatatatctcgatttgtttaatccttagttccttattcttttgttcttcattcctcatccattgttcgttgttcttcttagttactctcttgtacttatactggctgctcctgcttttagcgatgcttgtaaaattttgtaaaaggaaagtttaaaaaaaattgtcaagcctctcttttctaaacaaaaccctaaacagtaatatcagaaatattactgtttgtgtgacagacgaatacttactacgaaagatataatattctagaatactaaaatagataaatgattcctggttcgttatctatgcatacgttccattttaatgatacataccatatatagtctaatgatacaagactcaaccagttattcaccttcttcttttaatctacaaagcccttatttccatttttcctctcagggagttaacaagtccaattttaataaataaatagacatggcgaacttacgatgatgtcctatatatacaccacacaagaatacgctaagaaatttatgaaatgtaatagggctatctgacgtcatattaatctccaaatagcagaacttaaacatctcattaaaaaacttactctcccagcttagagagaccgtccacatgttggtgagacatagacagccaatgatactggtgcaaattatttttaacctgatcttatttaagcaaagacagaacaagcgtaataaaacaagactaccaaacccaacagctaataaatagctgaactggagatcatccagcttttataaaaaacgaaaataaaccaaattattttttatatttcttttttttctagatttgcagataaaatgttggttaccctcatatatccttattgacaaatttttaatttttttaagggtcaactaatctaacagagaaataaagtggtaaaaaccaactcaaattagggttataaatttttcaaaattaatttaaataatctttaattaatttgtaggtaatggtgctgggactagaaattacagtcttctttaaaaattgtccacaaaatcagtaaatttggatgcctttttcacttaggaagttttttttattcaaaacaaatttaatctggttagggtataatgtaattgtactgttttttccgaaaactaatctttaaggccaaattatatattacgaatgtatataagaatatctaagaataaaacactataatattttattaaaatgaacaataataaataagcattaactcaaaaaaatagaaaaaaaagagagaaataaacatttctattacttgcaaattctactaggtaaaaaaagataactcgttccctaatactttctgcaagctgtaaaaacttgatttttaacaaaatagaataacaataaatggaaaaaatttatcacttcatttcttgaaaacaactttcaatagaattcttggatattttacgcacgttttaaataaagatatactttctataaaactctttgtagtatatgcttataaaaagactattcgatatatttaacaggaatattctaaggagggttaatcctgtgtttacgattgtgttactctaattctccctcattatcagtattagcatagagagccatatgccaaaaaacttgaaatcaaaaattgaaaaacgctctaacaagtgtgccccaaaaaggaaaacaaagtccaacttttagaagagattgcaaataataatacttcggaaaacattatttcttgattctagtttgcgtacaagctttaacgtgtattgtatctttatttttacaacaaaaataacatctattttgtataaaactaatatcgtttgctacctctctatcacgtcttgtataggagttctaacatttatttcataccaaactggatattatccaaaatatcaaaagaccttacccttgtagaaataaaaaattggtatcactgagattttatcacttaaattggactaacagtgcctcacttttgctctcatttttgattttttaaacaacaaactattactgaaaatcaagttatccaaaatacttcagagattaagagtcatggtactacatcaaatatctgttcctagaacatttagttgtctatgtaacatgatttattagtagtcggtaattagttgtaagaagagtgtgatttatttttttgaattatcttttactatctaataataaagtacccattctgattttagtttgaaagaaaaaagtaaaaaccttatagatcgctacgttatctgggtgtgttttcttttttttttttcaactggaattctcagaacatgttaaaaccatacttgattgattttaacagtgtatctttattgcctaattcaaaatattgagtactcttacatacacccatacacgtaatgactatttctttacaaggatttttatggataagaagaataaaaaaagaaaaattgatgatcaatctttttacttaagaagaagaaaaaggatgcaaacaggataatacttggataatttaatatagaatggtaattttgagataatatgagtaaaaaaaatagtgataatagtaaatagtatgattttttttaccaaataagaactccgcatgtcagctgcttttctttcaaaaattatacaatatatataatttaatggaagaaaaccacatgtgcataacttctaatttgttttgctttctggatttatacggatttgaaatatttttacataactggagattattttgactatctaaatctttatctcattgaaaatatgaatatttcatggttaatccctgacactctagaaaattttaacaaatgacaagtggatagttttatgtttcatggacattattgtttttttttgttcttctaatggtaattgttataattttttttattatcttagtaaatccttttgaattcagttaggattttatttgaagataataaattaaattgtttatcatatcactactatttccattttatttatactttattttatctcaattttatgaacttccaattctattaacaatgaatggttttttttttagtgaattttgtttagaaccatttaaagacggttgtatttagtgaaaaattcatttattacaactatcccacttactaatcttattctctggatgatctatttattcttcatgataatcaatatttcatgattattactcttgtttgttattagatgtgagatgcaaaaagctaggttattttccctttacccatattattagtgtttttgttattccattccattctatgatgcaatttttttttgtttttttacttggagaggtttttgaataaatatatgtttctttaatattttatatcattagtgactattaatgcttatcaaaattgttcattaccacaagagttgattcagatattttattcctaagttcccagtagggtcaacatactagggctcttaaattatatgaaatcaacaatgtgatatttcctattattcttcatttctatatccataatccttaacaacaaaaaaataccttttttttttagtatctaatccatattagttatgccaatatggtagttattttttttaatgatatgcacatttcttagtataaaatatcatttatactagtattgctccatagtagtaattcattatcctgttgtgttttttttagtatcttttactatcatcaattatttctttttttagggtacaacaagagaataatagaatatctttttttgatgattcacatgttcttatggtagtaaatatacaaattttgagtattaataggaaactactaaagatgatattatatcaaagaaatgcaatttttggaagtctttttttttctttttcttttttttattaattatatttatatatgaaattatcatctctatttttttttattaaattatcttcagttgaaggaatatattaaaaaaaaaatatgacattttctacagtattgttgaacaagaatattgctgtcgatttcttcttgagaaagaattatatcatatagaatattactccttttctgtgaagttaatatcaaggaaattttttacagaggatgaattcacaattgttcatcaataaaatcccagaaagattttgattactgatagtgctgatgctaatacagtcctattactattacgtatacatacttctgatagaacacatgtttttctccaaccaaaacgaaatgatgacaaatatgctgactccatcaccatttttcttctgttaatatgcttaatttagtcaacacaacggaagaaaaaaaaattgacaggggtaaaaaaaaagtaaagaaaagaaatggaaagaaatcattaaaatttgggagatataaaaaattgaaagataaagcatatttatgaattacagacgtacatgcatacacacacacatatgtatatatatatatataaagatccaatccttttgtgcgtccttaaccataagagatttctttaaaatactctgcattctttttcaaattaatatattgttctattccttaaacttatatcattatcaatatcaatttaacaaccacttttaatctaccacccctttatttcaatcatttaacctatcatagtcgatatcagagactacaattttaataagaaaaatatcctactaacacaatgacttcagaatctgaaaaaactcaaacaccaattatttttgctccagaaacttaccaatacgataaattcacattatctgaagaagatttagaaaaagatccaattgaacaattcactaaatggtttaacgaagctaaggatgatccaaaggagactttaccagaagctattacattctcgtcagctgaattaccaagtggtaaagtctcttctagggtgcttttatttaaagaactggaccctcgaggatttgtaatatattccaattggggtacttcaaataaagcccatgatatcaaaactaatccaaatgcagcagtgaattttttttggaaggacttacatagacaagtcagagtggagggttttactgaatttgttaatcgtgaaacttctgaacgttattttaagacaagaccaagaggatccaagattggtgcttgggcatctgaacaatcacagattatcaaaaatagagatgaattagaagaacgtaaagtcttgaatgaaaagagatgggaaggggttgaagacgttccatgccctccatactggggtggtttaagggtcgttccattagagattgagttctggcaagggagacccaaccgtctacacgaccgttttgtttataaaagaaaatcagaaaatgattcttgggaagtatttagattagccccatgaatataattttccttatatacgtatgtatgcgtatattgtatattttgtagagcacttttgttatattagtatgactttaatgaacgtaaatatatgactttttaacaataaatcatcaagtttttgtacttgtatatacttttgagagaaagaaaaggagaaaggaaaaaccgtattgccacacactacgcttcaaaaagtttcaaattctagcaataataaagtatacaaacattaaaataaaatctgtaatttaatgtaactacactgggcaactaagtatatttttaccccagtcatttttattgtactaggtttctttttgtgatcccctgcttagtgcataaggcaattatgtttttgcattacttcttatacatatatataattgtattttttttcttttacgaaaaaaaaattaaactgagttctttaaaaaaaaactttaattttaagaggagggcatctccatggaggaagtgttgcaataattacgtctatcaaaaactcaactattatttgatcttttctatagctgaatttaaatttgcaggattccattgatctatctaaacaattatcgagtcacccgtacttacttcttagaaccattactaaagaaatatacaacataaaatagaaacgatgagtaagattagaattgaagattctgctactaacaaagctgagttaaatgagtttgaacaacattatttcaattcctacgataactatggtatccacgaagaaatgctgcaagatactgtacgcactttatcttacagaaatgcaatcattcaaaataaagatcttttcaaagataagattgttttagatgttggttgtggtaccggtattctttccatgtttgcagcaaaacatggtgcaaaacatgttatcggtgttgatatgtctagcatcatcgaaatggcaaaagagatagtcgatttaaacggattttctgataaaattactttattacgtggaaaattagaggatgtagaactgccattcccaaaagttgatattataatttctgaatggatgggttatttccttctatacgaatccatgttggatactgttttatatgctcgtgataaatatttggttgaaggtggattaatttttccagataaatgctctatccatttagctggtttagaagactctgattataaacatgagaaactaacttattggcaagatgtttatgggtttgattattcgccatttattccattagttatgagagagccaattgtggatactgttgagggacatctagtcaacaccacaaagaataaaattattgaattcgacttaaatactgtcaaagtgtcagatctttcattcaaaacctcattcaaagtggaagctaaaagacaagattggattaatgggttaatcgcttggttcgatattgaatttccacatccaaaaggtaaaaaaccaataggattttccacaagtccctttgcaccatatactcactggaaacaaactgttttttatttagaggatgatttagaggctgaagctggtgatattctcaagggtgaattaacatgccaaccaaacaagacaaataatagagatttggatataaaaattacctatgagtttgaggctcatggaactgattctaaagaaagatcaaagaaaaatgaaaatgtttatttaatgcattgatttaagagaaaagaatcgagttttattttatttctttcttttctgttttactctcattttgcttgatttaattttattaatattaaattagaaatatatagactaatattaattgattaatattcacatgcaacctcagaaatatatgtatattgagttatattatttgtatactccattctatcctaatactttcttctccttcttctccctcttgttacttttatcttttttttatctttccaaccaccttttttctttttaaataccatcatactatagaaaactaatagcgaaaaaaaaaaattcagaaaaaaatagtatattaaaaataattaattatataaatgaataaaaaaaatttcagtctattatacaaatattatctgttatactatttaatcgtgcttcaaggtttcggtgaaaacagcagctggcttagaagcgttcttttcaatcttcttagaacctaacttttcagcagcgaaaaccttagcgtatgggttcaatcttaataagatttgcttgttctttaatgggttcttcttttgaacatgagtacgtttttgggtggctggaccagctggtctaacaacagattgaatttcagaagagttgatgattctggtaatgtcagtagtagagacaatgttagctggcaaagagtaaccagacttagcagaagcaacagtttcagaaccccagatagcgtctaattgggagaaagcagattcagtccagataacgaatctacctaagtgagcacctggagctaattgtaataaacctaaggaggcgacattggcagtttcaacacctggaacgtttcttaaggccttaacaataccgttgtcttgagcgtaaacaactaatggaccttttctttgagtccatcttctgtttctgtacttacccttgccggctcttaatttcttggactttaagacctttaataaatcagcagaggcaccgacagccttcaaagcagcaacggcatccttagtcttttgaacagattctaagtcagaagaaacaactaatggaatttctggaatcttttcaactctgtgacctctagctaagaccaaagaagcaacggcggtagcagcgatagcagaagcagtggcataacgtttttcgttgtggttaaccttaacgttccattttctccaggtcttggttggagcaaacatacgaccaccacgacacatgttaccgaaagcaccttgaccggatctaccagtaccaccaccaccaactcttggaatacgggcgacagcacgaccagtaccccaggattcagcagaggtttggtgaccagccttttcagaaacagcgtaagcttgtctcttgttcttgttaacagacttgaacacagagtggacaatatctggacgaattggagcagagaaaacggctggtaatggtaaagcggtagaagtagcttcaccggttaaagcgtgaacagtaacttgtggttgagacatttttctttggtgattttttttattcaactaaaaggaacaaaggggaaaggactgtcaagcaaacgtaaatgtcaattgtattgaaagcaaaaaaatccaaagagttttgttcaatggtaagacaaggtgctttaaaagtgaattgaaaaacaaatcttcaagttagtttatatataatctcaaagaaatgagtaacatgtctcaactttccaacagaaaaaaaaaatttttttccaccacaaaattgaatcaaaaaaaagaaaaaaaaataaaaaaaaatttttttgtgttaaaaacaagaaaaataaaaaaaaaggaactgcctttgggctctggaaagtctagattctctaaaaaccaaaaatttggctatctttgaatttcctaaacggtctttaattttaaacatgcggacattaaaaaccgcgctaaatataggcttattccgccagatggcttgttacaataaacacataacagcaatcgtgaattgcggaatttaattaggtgaattgttgctttacataataaacatcagattctttgcggaatgtataaactgccaaaccagaaaaaaaacaaataaaataaacaaaaacaggattataaaatctgattagacccatatatcataatggcttaaaaatttcacttccacttcttctagaaaaaagatcaaaaaagaactgcgcaagcccggaatcgaaccgggggcccaacgatggcaacgttggattttaccactaaaccacttgcgcctcaacctcgcgactactactgtggaatagaatagttataatcatcaagattacacaagatcctgaatgaagctagaactaattattgtattaataagccatacacgtgctacaacattagatgctgcataataaaaagattagattacataagattctggcaaatctagaattacctgttgttttaataagtcccacgtgtattactaaccaccatgattagagaattggggtgcagttctaatccactagtgcacctaaattaatgtaatgaattttagggtgaatcagtcaagtcattaatgtactaatctgaataatcgatcgagctccagaaaatacataaaaggacaacgttttctggagataaaaaatcatcttccatgaccgttttttgtaaataatctatatattatatatgaacaaaaagagaacaacaagcaagtaacaagccaagtaacttcgaataaatatattagctcgttaaagccgctcaatatataagaccgttttagtaattgtattatcgattatagttgattactgtctcgattacttgaataactattaatattatttgtgcttccctggaatacacaaagaatttcaccacttcataatacaacagttaccctaaacaataatagtactaataaaagaaaaatattccagattgacgataggtttctgttgtgaaatttctatgaaattagattcttcttattgtattttttttattaaaaacatacattcaacttatcatctaatttcatacattcttattacaaagatatccatatttaacataaaaataaaaattcttccttctattaatgcctactttttatattatccccatacactagaaattgactgaaaagaaaatgtcgggaaagaaaacaattgttacgtactgaaataaataaataaagaacttctttacaatgtttaatcataattatcatatttaaaataaaaactttttataatatgcttttaactatatttgtaaacttctacctcttgtgccttctttttaacactttattcattaattatgagagtaaaacctatttttaaagaataatcaccatttttaaggagaaataataatagttctgtccaaactttttaccaatatatttttttccactatttaatgcaacttgtaatcagcatcctgtaagaagagctaattggaaatcttggaatacctagtctgctgaaaatgctaattgtcaaagtgaaggacttagaacaaccaaaaccctgggttcaaaattgtaggtgtattcaaacgagcaaacgatcgttggatggacattggtggcaaattactaagaagtttacttaagagacccttgattattaagagatagtgccagacgtaattatcaacattaatattcgtattctatctaataggttctgtctagaagaatagctagaataatgataataacctgaataataagactaatttatttattagttagaattaaccaattatataatttgcaagtatctgtatatatgattaatatccatatttttgtataccacttaaggtaaccccttacaatatctttcttgtgaaaagaaaggaatacacaataaataaaaacaaatttataatactcctaattttctaattcttcataataaatatataacaactataaatttattctaaagactattctatccaaatagtatccacataaattacctccttttctttgccaagaaactttctaatatatctgttcggggtgtcttagctacttttcttttagaagaatttgatgcttgtaatttacctgttagtttattcttcctccgtgtaaaggactgatttgaaatacttgatttttgctttgaataatcctcacccctattatcatcactatcaccactcataattatatgatcattatcagaactttgtatattttcatcactatctgatataacaattgaatctggggaactttttcgaaatatactattgctttgcattttcaatgttttgtctactgaagatactaactctgttggtttaaaggatctccgggaaactatatcaattttgtccaaagattttctagtaaaagagggatcgtcaggtaacaccctatttacattgacagaatcttcttctgaagcaatatgtgacgacaaaactgacttttttcttgatgtgtttgcccttttaacttccttaattaatacctttatatcctcaggattttctttatccaaaaattgtccactagaaaccaataaatctacttcattatccaactccttatcgataaattcctttaatgctgtcttttcatctttatctacaaatttcttaatggcatcattaaatccaacctccggtaacagagataattgcattttgtttagaagatcattaaccaacagttcgatttgtaattcaccattattattactattctcattattatttactgataaattacctacttgatcattactaggacctgcatttttatctttatctcttgcaactgttggcttcttccttttataatattgaacaatattattactattggcaacacgaccaacaaatctattactaaatcttctaggattttccacttgataatccagcatatcattaacaattattctactatttgtaatcgtgccagaaccactgttacttttatttgaagacgttggtccagcatagtttactctcaatcttattaaaggaagtggaatagtgattgataattcatttaaatcatcatcttgattcatttgatcaatttcaataccattttgcctcaatttttctttagtctccttatttgcttcatcaatcatttcatcaacctgtccaattaaatatttagtaacagattctttgtcgtgcggctttaaaaaaggaatttcatttaaagatatatttctcatcttaaatgttcttattgtcgtcaatgggatcggaatcaaccttggttgacttttattctgcttgtaattaatctccaaaatgaaaacatatttagatttagcctcagcatcgcataaggatgtagccactgacgatcctggttgtaaaacattgaattcttttataggattgtagactagatttggaatacactcatgttcatgtccccaaattacaagatccaaaaaatctggtaaaaactgttcgggtaaaaaagctgtattggtatgtcctatgtgattttgatgaacacacattagattaaaccattcaccatcacgtatagtgggaacctcaaaagtaactcccccttctttaaaagtcctaaacaacctctcctcccgaattgattgtaatccatacaaagccaatttagttttccccttttgaaataacagtggtgataaacaaatcttatcagtctcaagaaccttcccaaaatgattcaccaacccactaacatgtaaaatatccataggacaaagtaaggaatcaccagtggcatcgtcatgatttcctgaaatcgcaaacattgggatagatatattaaaatttggatcctcgtaattaacattagtgaaatcactataacccaatacttttgaagaatcacttaacaattctaattcacagggcttatcacccatacaagctaatctaatggatctcatcacttgatacaaagatttcttagaaggtttatttatatgaaacaaatctccactctgtaatatcatatctacttggtaatccttagcaatcatcattatttcatgaaaagttttccaagaatcatcacatgttatggggtcattttcgttgtaacctacatgattatctgtggtaattaaaatacgaattgtatcctcatctggtaaatccatattaaatgaaaccaaataaaatatgtttatttatctctcttgttccaccgatctaatacccaatatattcaaagacacaaaactttccataactatatacacataaacatacactcctgtatatctagtgcactgtgacattataggtaggttcaaaaaaaaaaaagacatctctgattaacatgcttaggaagttttaatttattttattttacttttacttccagttatttttttttctttcaaacttccattttaaaaatatatatccctgtacaaatatatacatgtaagtgttagtgaaacaataattataatcgacgacaataaaaaatctcatttgacactgtcatataagataatattatctatttattcatttacctgttataaatatatgtatttacaagtttctatttcgattacctaatacaaaaagaatcctccttccctctttgtatataaaacattatataaaagcaaatgcaaacgactgtgattccaaagaactgttattgttgctggatagtttctttaattttcaactttcttgaatgtgtgtcaaatatatttgaaagttcttcaaaatttgtattgcataaactatattccataacttttttgtccttaaaagtgacttttatcataggctcttgatttggatcagtgattaattcttgtgtcatctttgtacctaatacacgttgtttaggtgggatggatgccattataagtcttgcagttttagctaattatatcaagaaataggaataaaataatggataaagttagaatgttagtaacaaagtaactcactgataatagatacagactactagatacatataaaaatattgtagcaaaacaccttgcagttataaagaatccattcaacaaatacctaacaacataccttccttcccaaatggattaaatttaacaaacacctgtgtcatatatttagtaagcattttcccttttttctttagaacctccctatacacacataaacacacacacacaaatacaggataattatttagcccctattgcactgtgatacctaccaattactctgtgtttagggagtttaaccatttattgtagcacttgtattaatatgtatgcatacaaacgcacgtatatatatatatctataatatccgcagattacatggtctcgagagttttccatctttatcttttccattttcttgaaatttctaatcttaaggaactttttttgaagataggacaaatcagaacaggacaagacaacacaagaagataaattgagttcaatgcactagcttacatattaatgtaaattctggcattgacagaaacactgtaaagaatatacaatggattattaaaacatataaagaaagacagaagaagagaaaaaagaaatatgaataacttaaaaaaatcaaaggtgaatgttgactacaatacaagtatataacaatataatgtgcattattaacataacaacttgctacacaacgtttaacaaatttttttagtggatatctccagactttcctcatttagaagtattacggtagatatgatatggagaaccttgtgaagttgggaaaattaaagcgtctgcaatcacagtgttattacgtcttgaagtagaataaacaatcaaatcggcaacatcctctgccattaaaggagatacgtcttgataaacactagcagcccttttagtatcacctttatatcttacgactgaaaattcagtctcaacaacaccaggtgcaatcaatatgactctaattttagtattaatcaattcttttcttaaactatcagtaaatgcttttacagcaaatttggatgcacaatagatggacccagttgggtacgcttctcttcctgctactgaaccaaggttgacgatatcacctgaattttttttcttaaatataggcaatacagcttgtgtcatgttaattaatgcaataacatttgtatccatcattccctttatatcctcaatgtcaatctcaccgactggatcagagcctaaagctttaccagcattattaactaagatatcaatatccttaaatttttctggcaagttatccaaaaacggtttaattgcatcaatattagttacatccaattctgcgatataaatctttgcatgtggatatttttgtaaaagctcgttcttcaaagattctaatttagatagtctacgagcacataaaatcaatttggtcttaccatcagacgcatccatatattcgactgctgtagctgcaccaatacctgcagatgcaccagtaattaaaacaattttaccttctaatctttctgctgcctttctaccttgtgacatttctagttttttttttgggtactagttcggttttaacatatacacatctctcaacctcaccaaagaaagtaaatatatcaccaatcactaataatagttcatacacactccctatttatacacatagtgtcttactgttcgaatcttagaatccctcattttcctttcaggatttcaccgtataaaatgcaccaccgatcttcacaacagttattaggaagaacttgggcaaataggcatcgaatcggtatttgatacactatctcaaaaaaatggtacaacagaaaacaaatcaaaaataaacatgcaaaaacaacttacccatcaacagtttgaacttattaatgcattaatagaaaaaaagttctgctggaggtaacaatatagttagtcattatatccacattttcatatatataaatataacacatatatagtttttattttctatctaaattacactgtatgcataactaattacttattagttaacaagataaatccttttttaatgtaccattgaagagtaatactgattattagcaatattatctcacacaagaattctgtgttttataattgttattagatgttattacacaattgcaacctcaaaaaaaatgtaaaccgaagtacttttgtactaaccttagtttaaccattttttcttcctctctattattcttcacccaataacttccatattcactacacatttttagaaaattattctaaggatggcgataccgtgcaaggtattggactatttgccaccgaggctaccgaagtattaacattggagggtattatcaacggagtacttgcaaattttgaatcaaatacactaaaatcaattggttttgtatcattagtaatctcttgatatttttgaatcacttgattttctaattctagtgaatcattatagatcacagagtcctccgtattatataccctagcattcgaaaatatcaaatggaaatcttccactatttcaaataaggaattatagagcttattatcaatatgatatctaatgttttcaaatgcacaaggatacttgattaataagtaataatctggatatatagtttttggtggtctttccataaaaattggagacaacagtctacctaattcatttttatggttcaatgcaaagtcataaataagctctgcttgacttgaaatcgcttcccgttctaccaatggaagtgctgtattatctaataccctaatataatgtaatccattcttatttttactaggacggccacgaccacgacctttaccacgaccacgtgtagatttagaggccctcgtttttgttgaagttcttgcagacttgatggatgtcttgcctgctgttgtaatagcaccttcttcatcctgttgttcttgatatactgttgcatgatcattcattgacccttcaggtgtgcctgctatagttagtggtgtctctggtataataccatctccattattctccaacttggcttgctttaccctataagaagaattatcagcctgtcctttccgttttctacctcctctaatttcatcatcatcatcattctcatcatctgtaatttcaaattgcttcaaccattgctcttccgtaagatcatcattataaactgtcttctttctatctctagatgatctgccttcgcttaattttaacgtttcattctccttaacttcttcttctgttgggatctcctttgtatagatatctggtaattctgagatatcaaatagtctagttttaatacccaactctgaatcgtttacagccctttcattatctaaattagaaaatattgctaattcgttatcatctctagccaacaattcgttgatctcactatcattcaattcatcctcttccaaatcaccagcttctcttcttcttctacgatcttcttctgcctctaacaacgaccttaataaagcttcttgttcttctgctgtagatttattatcaaatttaccagcttgaataacttttccatcaatatccaactttttatgagccctttccaaaatagcctcttcaacagagtgttcagtaatcaatcgtaaaatccttacttcattcttttgaccaattctatgtgctctatcctgtgcttgtaaatcttgatgtggattccaatctgtatcaaaaataataacagtatctgctgtctgcaagtttaaccctaaaccacctgctcttgttgatagaataaaacaaaaatattcagactctggatcattaaacaatcttagaagaacactacgttcatctgattttgtatgcccatccaatctaagatattttatatccataaatcttagaaaatcttccataatatccataatttgagtcatttggaaaaaaatcaaaactctatgacctgtagcctttaattttggtaaaactctttccaataactcaaatttgcccgctactctccaaatattaaaattagtttccctagttggattgatttgatcttccacttcttcaaagacaaagggatgattacatatcttttttaattgcattaattgattgttaaatccacgaagcccaaccattttcttattcgtatgatcaccaacatataaacgacgatgtttcaacatctgttgatacataatctgttgtaatgcactcatcttacacttgataaccttttccaccttatctggtaaatctttttccacatctttcttcaaacgacgtaacaagaaaggacgtaacactttatgtaatcttctaatgactaataaagtttcttcttcacttaactcaatcttatcttgaccaccagtatttgcaaatggtgtattaaaccattcatcaaatgactgtacagaattaaaaatctttggaaggacaaaatttaataacgcccatagttcaggcaaattattttgtaatggtgtaccagtaagaattaatctgtagtctgaatggtagtatgtatttaaggtcaatgacaactttgattgagcatttttcatcctatggccttcatcaataatcatatgaacccatttaattttagacaataatgccttttccttaataatatattcaaaagtagttaacactacatcaaaattaccactccgaattgtggcttgctttaattttctttcagcaggtgtacctttaaaagaaacagtacgaagtgttggagcccacttggcaaattcgttgctccaatttgataaggtcgataagggaacaataactaaaaacggaccatgaacctttttaacctcatataaatacgttaacaatgaaatcgtctgaatagttttacctaaccccatctcatctgctaaaataccattcaaatgattgttaaataaagaaaccatccattgtaaaccttttatctggtattcttttaatgtaccaccaactaaaatagatggttgctgcttaatctcttctttgattctatgtgccacattataataatcagcattctcttgttcctctacatcgacattgattagcccattttcaccactcactgaagaggcaggagttgcagacgtactagattcatcgccatcttttttaagatgtgattcaatcatagactttgtaaaattttgttgatccttcaccgcatttgttaaagactccaaaaactcattggtctgtcttaataaatgtgtgattcttgtgtcctttgtctgatctaacagcttgatatatgcttcttcatcgttagcttttaaagcttgcaaacgttcttttgcttttctctcttgtctcttttgttcctctttttcaagattaccatgtaaagtaattaatttatgaccgaattttattcttctacttctattttctagtctaccattaaattgttttattgatctatccaaaataaactccaatctcctagccccgtccctttttctcctttcatactgttgtaattcatgtttcctgtaaagctcttctgttaagagagtatcctgaatattaatatctctaatcttggaaagaaaatttggatgagtattagtaagtaatgaattttgataccattcaaattgtaaaacgtgccctcttactgctttttgtaatggcaacaactgcaatgcacgataatcaaccatggctttatcctttgttattttatctactttatcgtctaataaaattgctaaacagtcgttcacagctgtatctagatttaatgcaattaatgtctgatatatttcagcggttgtatgtgtatcaataccttctggcaataatgaagggattatagtaaaatctgtaggatcctttggaaaaagagattcataagccacttctgtattaattatagatggcaacgaataggaatcaaccatgatatctggatcttcaatttcaattattttttctgccatatcattttttttcctgaattcatctaatggaataggaggtgctggttcaggaggttcctgattttcaataatttttctttgaatttctgtagatatttttgactgtgtatctcgtgaatgcatcttatccaaaacttcttgatttgaactaactggtgtattctcatcttttgcatttttacttggtatttctctctcagcaaacttggatatcttagttttttctgatccgagattcatattattaccggtattatttattttgatcttattagctcttggagatttagttgtcttaagcatgccacctttattaatctgtgatatttcttgattcggtgaggactgaggcttaggaatattattaatgtgatcagcagacagagggccattacttacaacatttacaggagattgaactacttgtgatttttgattaatgaatgccaaattttgattcatagatgatgacagattcgtttttggactggctgacattgcttcatatgcctttttcatacgcaagtactcacttaaacttattaacatctttttaaaatctggtggatgagaaactgattgatgaatgatagcttgatattcaattggaacattttggtgatttactaaacactttaaagctgtgatttgggctctcaataagtttgattggcttggtgtaaatatatttggatgtgaagtagtctgctgagaattctgagaagttggaacattttgacttgcttgttgttgtgtttgattataaaccattttttgtgatggttgcttatttagtctgggggattattattattattattattattattattattatcttgaacgtgaccatatatagaatccttaggcatatttctcaatgttgtattcccggaattagtttttggagaaactgcttcatctaaagataaagttttagtttgaggtacataattcggtgtatttaggatattattagatagattagatgcagttctataaatatcatttgcattcatctgaacatcaacatttctttcagctggactagtaacaacattatcatttctattacttcgtatattaactgtttgcgataaattagaattgatgtattggccatcaggattcataccactagtggcgctaggaatcttattgattttgttgttatccatgacacttccattattacgattactactactattactattattattatcagggtttccagaattattattcaaattatttctctgttgtaattcctgttgttgcctagcagctacctgcaaagtctttgttaaaaatataaattctggaacattgggcgcgttttcgccatgctcattacgtagttgttgccacctaatataacatctattaatttcttccttagtgaactgtttctgtggtatctctatattcattattagcaaaatagtattatcctaatgtagttagctatctactggaacaagtagtgaaaaaaaaaggaacacctttacaattgttatgtgcaataactatttgaaagcaatatagcaaagtgtgatatgaatatttataattgctgttaaataggtatgaatagtgaataaccgaaatatatggcctcaataaaaaaggatatccactagtttgctgatggtgtgttaaaggatatataagataatactctaggtttcttctaatataaccaatatgtaaaagaatatctatatatctatgatgtatgtatacctagagaataatataagtcgcaatgaagatgaaataattggcggctatatacttataaattggatttactgcataccatacatgtcttctgcattcaactcttcaatcacgaaaatacagaaaacaaaaaagataaaattgaaattcgaaaccggccacgatttttttctttctttctttcttttttatgccatttcataattcttaaaaaataatcataccatcatttcacacgttaacatcaaaaaactgtaatatacaaaatctacactgactattacatcttactgtagcagaggcatcgaagatccttttcctaggttatattggatgcaaactttatatatataatcaaaaatgcttaactatttaacttaaatgttaaaaaaacactactatctccctcctctttctgagatcacgatgtatttttactcttcatcttcttctgcctcagctccaaacagcatcatcatgtccagatcattctgatctaatgattcatcttgattctctagatctgcattattttccatgttatttgtttgttcttgtccagcatctctattattatcctctaaagattcctcctcctcctcttcctcatcttcatctggttcgacgtcatcgtcatcatcgatatcatcatcatcatcatcatcttcctctccatcattattggactgttcttgctgcttattatcgatatgtgtttgactttcatcatcattattagttgagtcttcttcaatcttcgaactatactgtattgattcttcatttgctttcaactgtttcttcttcaattcaacttctttctcaagttttttaatactttccacaaatctcgattttaacaatggattagtagccttttctactttacgtattgtttgcgttaatgtactttccaattcttttaattcgtcttctaacaattcaatatgttgtctcttttcatttcgtcttcctcctaattcattatcatcatcatcatcatcttcttcttcttcatcttcttcctcttcatcttcttcatcctcgtcttcttcagattcatcttcttccaccataccttcttcagcagcagacccttcaattaaatcttctccctctctagtaaccttattttcagtattagaagtaacctcgttttgattctttaatttttcttgtaaatttttcgcttcatcatcatcctcgtcactttcaaatgcagcttcaagatccaattcatcatcatcctcttcttcctctttttcttcttcttctatattctcacctttgtctgtagtttcacgcttttccaaattactatctgagttgtttgaaatattagttgataatggtggactcgttttaatagtcaaagagtccatttgctgttgagatgagagattcaaatgactctgtgaagtcaatggtaatggctttgtatttatttcttcttcagtaattaattcgaatgtgacctcttcagctttatcatcctcatttaaaagtgtttctactacattctccacatattcgaattctaccgaattcattttccttctaaatctacgatttctaacattatataatggtgcagtcaacccatgcttataatcgtatgattttactgcaattttgtcaatttgttgaggggtcatatcatggttcccatgacttaaatgctgccttagtaacttgattttttctctatggatctcctgtatgatgtcttcataatgattactaacgagatcttcagtatcaggtacttgtaaatcaaatacttcctcctctttatcaatcgtcctgatgcacagcaacatttggctaatatcaaaggtctttaaaagattttttctatccacacttttattgacttcaatgatagtaggtagatcaacgaggatagcaccatacatgtaaccattaatcattaccactgcatgtctatctgtgacccatttaatacctatacctgaataatcaccagcttcgatagaatttttgacaaaatccacttgtgtatcgggtacaacccttagtataataccggattcaattaaagggtcactctcaacatctgaatcttctgaatcatatccttcaccaggaatacgaattgctttaactcgtactcttggttcatgtcttttcactttgattccactattattttcttctttcttctttaaatttagttttatttttattggacctgccttcttaacaatattattggaagttacatgattctcctttttcaaatttatctttatcttaggtataacctttgtgttatcctcattcaattttgtcttaattttaatctttttcttagtctgagagggttcttcggaggactcctcagtcttagacctttttaacttcactacggtcattttaataatatatgagtaatctaacgaagtttttgtagatataatacactgatatttttgaacgttgtaagtcaatgaaaagttaaaacttcagtaaaatagatgataatttactttatattttctctttttttattttttatttttggagaccactttcccactcattaccgactttaatatatatataatatacacatacataggtatatattatatgataccagaaacactatataatgtaacttaatatgcccgcatttatctgctggaaccaagtaatgctagtagtcattctatactacaaccaatagcaacaaacaccttatagtagacatctgccaatgcaagtataacaaataacaagatatgtatgatggggtgtgtggatgtacacaaaacacaatgcttcaaactctctaaatctttcttttgttctgttagaaccaactagagaggaagaagagagtaaatgatgattgttagtataaccagctccacatatttgtacagaagaaacgggtactgtaagatgaagcttttgaatatatatttttaaatatatcttacatgaaattgcctaaattcatgttagtctagacaaattttgaaaaagatttataggagaaaatgcctatcagggtcccaactttgaaagaaataagttccatcaaatataactatcagttccaatatttggttaaccctactgtgtgtgatagaatattttccaaattacaattaaatactgtttaccccaatgattgccacgatcttaaagttttggatttatatcctggtcctggccagacttcagtgatattcaataataaattcactccaaaacaacattttttgatggacattaggaattcatatgttgattttcaagacagatatttggtcccgtataataatgggaataaattgaccctaatacggaaagatccttatgattggagttcatataccgatttaatagaaaaagaaagacaattagatcctgggtttcaaaataaatcacatttacataacgagtttctaataatggcaaatgttacggaacgtaaatatgaaggtttgataattcagtggctaagttgtctaggctataagaattggttaatgaagtatgggaatgttaaaatgttactatggttacctacccaaactgccattaagttactagctctgcctggaacaaagcatcgtaataaatgttctctctatttggaagcttttgctgataccaatttggtggctttttcaaagagtttaacagtaatacaaaatttcgatccaacacttataaaaaaatgtgatcctatctttattgatgacccaaacgatattttccctagtaatccttctgatgaatccatatctttattagaaattaatccaaaagaccataatattgatatcgatacatgggattatgtcacaaaacaattaatgattctaagaagaacacctcttattgatgctgttgaatccctgggccatggtgcaagagaatattatttggaaactatcaaggataaacaattgatgaacagatgtccggttactttcactttcgaagagtttgaatatattacgcaattgtttatcaactggccctttaagcccgatatttatacagaattatatgatttgaaggttgatgaacctaggaattgacagctatttcaataaacaagatatcacattctagcacttgtcttcagatatatctatatatgtgtacataaaaaacagagataaaaaaagaaagaaaaaacaagaagaacaaaatcgattcattgataacttgaaaaagtgaattcttataaatccttttatgtataaattagtgtttaaccatattttttccattttctttattaatactttttttacatatgtataccatactattattatacaaaaaagtagattttaactattatacaatataaacaaaataagataaaataaaataaaataacgtttttaaatcatatcattataccctaaaattctcatcaacctaaactaatattttctttttgccgtaagcagaccaacatctaaataataatactctcttaagttgtagaattattcatcactctctattttcttttgtgattctacatattcagaagcctttgccttcacataatcaatcatcttagtatcgtctttattttcttcaaattgcaaccatttattgaagaaaaatttagcttgttttctagttatctttttagtaataaccctttcaaataattcttcaacttttttcttttcatcagccttaatttcttgatcaatatatacattccataagtcaattctctttggtgcatctgccaataaaccttcaaacaaggaacgacctctttcggcatcacctttactgaattctagttgggcaaactttctaacaacttcaatatgattacgcttaggtaatgattttaaggcgctagctaagattgaacgagcttcatcttcatgtttgtttgaaagaaggaaatcacaccatgcaacccatatggatactttttcactaccaaacttcttggcagtaaccttaaataattcaacagccttatccaatttttcactcatttgataaatactcaataacttggtgtgaatggtgtaggaatccatatattgacatgcccttttaaatacttcagttaaagtctctggggtaccaaaagtgttttctaagttcaacatagcaatccaaatatttaatttctcagattcttctctaaaattaatagttttcaaagcacgttctgcaatttcacgagccttttcaatttcacttaattgcaattggaatgccatataattcatccacacaacagaggagtttggattaccaataatcagacgttcgaaatcactaacagattctggagctctagtattaatatcaatagtcttatcctcaacaatcttttcttttcttcttctgtgtttatgttttgtgccttcagtgaagtcaacttcttcatcatcgtcctcatcaaactcatcatcttcttgtgcttgatctaaaatagaagcagtccaatcaaaatctgtacttaatgataatccatttgtagatattgaagttttcttaacaacatgagtttcttcctcattatctgaattgtcttctgagtcattgtcatcaaaattaactgcatccatatccacatcctgatcttcttcaaattcatctttcttttgttctttaacatgctctttgttagcaaaatgggaagccttcaaacttaaagataactgcttctttgatggattagtcttcaatacaatagcttttactctatcaccaggaccaaatagagttgatatgtcttttggagcagtttccgcaatttccgaaatgtgagctaaacctgtacaattaacagtattatctagtttaacaaagacaccaaaattggtgacattcttaacggaaccatcaaaaatatcaccaaccttaatatctgagtaatttttcaatatttgtaattcaccatttacttcggattctctcaaagttaataagacatgttcatcatcatcacatgaaacaaccttaccaattacatgttgcattggcttatagaatttttcccaattttttaagtatgaatcggacaatttgctgactggtatgaaagcatcaagtgatcttccaagaataataaataaacctttattagtgacagatttaacaaaaccatgcacaatatcaccttgttttacatctttatgagaagtaatactaggtgagataggtgaatttgatcttagagataggctgatttttttcttttctgtatccacagaaaggaccttggcagcaaggacttgatttagtctatctccgaacacactgtttaaggacattgaataatcatccaaagcatcagttatgaacgatataccagttactttatttcctaaatccaacaaaacatatttatcataaatacctgagatacgagctggaactatatcaccagccttcaaatgttcatagtctcttacaatatgtgatttgctaacagcattaataaagccatgttctaaatcaacagagtcaattttaactgggataacagaacctagtgggaaattatcttgaatattcattgaaatatctaaaccatctgcagatagatcaaccaatggtagtttagcctttaaatcaggattgatagttaaccataaataattggaagcataattattaacaaaaccaaggaattcatcgttgatcttaacatcttgaatagttgttaaattagccttatcttgaagtagaactgaaggcttcatagacaattcatatacagaagctttgcttatttgatgagttattggaaggaatctatgacttctgatgtcatgtttaccaatgattttaccttttaatatttgatcctttttaaaaatgcttagtggcgcttttttatcctctattttatcaatttcatcatacacttcagaaacatcaattctaccatgaatattatctgctatgataacattcaattgattcttttttacattcttgaccttaaccttgattactttaccttctgcaaggtctgttacagatttgatattgctatcaatggcaccagtaatttcatctgttttactgttttggacagaagatttctgctctctcaaagttaataaaaatcgttcatttgtatcatcaaatctgagtatagcagccttaacagattgtccaacataaaatttctttgttatatccacatccctactctcaacagcataacttggtaaaaccaacccaacgtttttagcagtaaatgcgacaaacaaacccctgtcagaaatagatttgatataagctgggaaaaacgtgcttttggaagctgttgtaatagccttatatgtaattggtagagtttctgcttttgcagcttcaattaaagactttttcaatgttaagttaaaaacttgggttctattttctttgtcaataaccaaaccctgtaaatgggttcctacaacaatctttttcagggcagctctgttttgttctatcctgtcatcagataaatgtgcaacataaataataccacgtaagtccaaatccttggttgaaacaattaaagaatccttagtcttttcaactattgtcacatcaacgatagttctaccaggaaccatatcttcaatagcctttctttgggcttcagcatttgtgttggcaagcttacaagttgcaagaactctttttccttcaacatcaacttttaataatttgactgtaacggtttgacctaatcttaaatgttgttctggtttctttacaaatacttcagaaatctctgcatttggcaaaaaacctctaacatcaccaaagaacgtaagaacacatcctgatggcttaaatgcttgaactgtagcaacagtcttttcgttcttttcgtggagttctgctgccttatcataggatgttactagtggaatatcctcgtcggaaacattaactagtgttttctttagcgtaacatatatatgatttttgccatcaacatccaggactctagccttaacttttgaaccaattttaaactttctttctgggtagactaatctggtatctgatatatgcataggtggtacactggcaataaactgaccgttaaagatttttaattgaattccattagaagacacagatacaatttcacaccctggaataacttctccaatttgaatatctttgtttcttaaatacttttgtttgataatttgagaatccgtagtcatttcataacacccatcaatggtgttataaccaattactctggcttctaaatcatctgttttttctaacttcccaatcttagatttatgcactctaccaactaaatcattgtttaatgctaggtacaagtaaaagtcatcgctacctttgactttagtagtatcaaatatataacctactgggaaggcgttcaatgcttctgtctgttttagttcgggtgaaagattgacaatgtgtggtaaagtcgaaaacaatattgttttttcaccatgtttgtcatatagggtagcaataatcctaccttgtaaattagaaccaagtgcaaatttatgtttaatatcttcttctttaaaagtgttcaaatgatagcagctaacaaatgcagggatcatcccaaaacatttaccagcaatacccttatccacatattgttggcatagtaaatctactggttggcctggtaaaacagcttcaacagaagatatttgagtaactttattcttgtgctggttaaaatccaaattaacatttataacacgatcattcgtctttgaaatattaccaagaaaaacagaacctggtaataagttgtcaaagtttggtgtgtcttttttagaaataaacccagttacaccatctatacccaaatctaaggtagcaccgtggtcttcaatactttgaacagaacattgaattgcagtggatttttgcaagtcatcttttgtaaaagagttgacaatagatggttctattgtcaactctaatctcttcttcttattcttctttaccttagagtcaagtgcactgttattgatgacagtacatctaatccattgacctatcttgaaataactatgtaagtcaggtaattcgggatttttatgatttgtactcttattagattcagtgtcagattcagattcatattcatcttcagctgtatctttgttagtttcaccttcttcatcagaatccatactgtcatctaaatcttctaatattttagtaaactgttcagaaatatgagtcatatttacataaccagatatgttatcagtaaaagttacacagatatcatatttagatatttcagtgatttgacctaataaagtggaatttactcttaagtttttaaaattgatgtgtggaataacagagagtttttgctcgtctacattttcaacatttacattgtcttttgatttattgtttttatccagtttcttcttttttttaggtcttgctgattccacagtatctttggaattaccgaataaggcatcctttgcagcttcattagcaacttttttcaattctagtggagttaatacagatccaccacctcttgggaaagataatttgtcactattttttactaataaagatgttgctggtttttgtgtgctgtcttctcttgaaaggggaaattcctcatttctctttctttttgaagaagaaaccatagtgttacgttcacagcaaaatggtagttgagggtataataatgattatttctggattcttgtgtttgtatggggatcgtgtctaacaatagggcaagtaataacttatataagatcatctacttttttaatttcatagctcatcgccaggtacctgcgaaatatcaataattttttttttcttattgaaaaattttcaagaaaatataaaatcatttattacggtttttaaataaacacttttatgctgggactgttttacatcggtgcatcatatattttatttttcttttccactgtagataaaaactaaaagtactgctggattaggttagatcggtttttaaagattgtggcattatgatttaaaaaaaaatcacaaatcttaaaaatagcagacttgtttgaggtcgcaagtagtctttatgtattctttcatttatttactaactttttatttttttttttcaattgcgtactttttgcgatgagattcaggtagctatggatttagatccttgattctttaagtagtaagtgacaatactacttggattttgtgcaaacgctaaatgagagaattggttttagttaatttccgtacatctactccgtggtgctattatgaagttttaaagttctttacttgatggcccataatatagttattctaaaaatatgttcaggtctggatgagaggaattcttacgtaacttcaagtctcttttctttttttgtattgttgttgtattgtttgccgtattagttatctggtgtaactcttattacaaatgtttaggtattgctggagtggtattatagacagtcttggaaaccttatatagaagcagtggagtaaaaagaaagttgtaagaatgttgattccaaaggaagaaagaactaagattcacagatacttgtttcaaggtatgtttggttcgtaaccaggggtgagataagataaggaaggaataaaaggaaccagaattgtaatgattaaaatttagggtctattgcgttaaatgttatataattaaaggttatttatgaaaacaagtaatacgaaagtaaagatctacttatgaaagttccaaattattacaactctttaacttagggaagagctcaaagaaattacaatgtgtatactatcaattgcagtagacaacaaaatgaaaagtagtccagggtgaatattcaaaaagagatataaaagattctaacacttatcataattttgaaatcgatcggtaaatataaaagttataagaattgttatttactaacagcgattactttttattgatattacaatgacgatatagttgttaatatacttcaataattctttccttgcataaatatattgtttcttttaatttttttcttttttaaaaacagaaggtgttgttgttgcaaaaaaggatttcaaccaaccaaaacacgaagaaattgataccaagaacttatatgtcattaaggctttacaatctttaacttctaaaggttacgtcaagactcaattctcttggcaatattactactacaccttaaccgaagaaggtgttgaatatttaagagattacttacatttaccagaacacattgttccaggtacttacattcaagacagatctcaaaaccagagaccacaaagaagatactaagttatttgaatttttgtttttatatttattaaataaggatatatacattctcataaattaattaagaataaacgcattgtaaatttttcaacagattttcggaacgatgaattctctgatactatatatgtttattttaatagcctcgacacacccccattcaaactgaaccacaggtgtgtaagaaacaaaacaaaaacggtgaaaacaagttatcgaatatttaacaataattttattatactacactgtacaatgctatgtagtggtctatctaataaatacagttgtgatcttctggaggaagaaatgataaaattcagattaatatgtacttgaatattaagaaataggtattaaaaggcggacagataacaatccttaatatattaagagatattaacagaagatatgtgtgaaagaaaagataataatttcaaaaacttctccatatcacaagtacctttctatatttttctcttttctgttttttttttttttcttttttgtctttctgtttatttaacaccagaaatatttcaatttgacccatatcgaaccattcttgactctttctttattctccatatcttcttgcctcattagttctgggtcatatattcttctatgagtctccaagtcgatttcgtctagtttagttaagaatgtccaatctcttttccagatcatataaccaaagtaaaaagcaagccaaattgggaaagccaaatagctttcaaagaacccctcagcggtcattgaacctgatggtggagccaatgccacccaaaattgtgcaataaacactaaaatgttgaaaaatacaccgtagacagatccccagaaaccagtatttgctttataacctaactcatccagatctttgccttgtactttcatggccattctaaatctaatgtgacttaataggatagaggaccatgtgaataattcagaaagaccggcaatggcggctaaccaagtgaagacttgttcctcttgggaggagctcgcagaaaaggcaataagaccaaagacagcacaagtacatagagcccatagcggtctaccttgtctgtcaatataagcccaaaattttggagcaaagccttgttccgctaatgatgctaataatctaggagctgcatataatgaagagttaccgacagatacgaccgagatcaagataactgcattgataatatgaggaacgaccctaacaccatgaatggatgcagcaaggacatatggggaggcgtgagtagcagaacccccggaacccattaattgatcgttgttatgtgggacattgaaaccaattaagatcatggtcaatagataaatgatcaaaatacggtaaatggattgctttgctgcagttggagttgattttcttggattttcctgttcgttgacggataacacatataattctgtgccaccataggagaagtatgcagtaacaagaacgtaacaaacgtctttaaatctaccaatagaatcatcgctaccaaatgcacctggatcgtgccagtacttaccaccgatataaccgtcctttcctgcaccaccacaattgacaacaatggaaaagatgataaaacctgcaatcatgagtactttacaactgttgaaaatgaactcagcttcaccgtatgcacgaacaccaaaaaaatgaataaataataagaagacatagaagataacgatatacacgtctgcatcaattttatcgttccagtactgaatagtcattgaagaagtaatcaattccaacggtaaaacggttagccattgtatacagaaaagccagacagtagcaaaaccaaaaggtttagagataaatatggaagaataggtattgaaattaccaggtaaagttggataggtgacagccatttcaccagctgcttggatcataatgtaagtaatgaaggagacaagaccataaccgatgaccaaagaggcgggaccaccataatgtaaaccttttgcatttgccactaacaaacctgtaccgataccagtaccaagagacatcataaccacatgacgtgatttcatagcctttttcaagtttctatcagtagcaaaggttcttcttgtattaacactttccaaatcttcatcgtcgtcctcatctggatgtgcattttcttctggaggtttgaatgaatctataaatctggtaaaaattgaactctttttattataattagaatctgctaaaatacttttagacttcgaagaatcaagacggttaatcccgtcggtggtaaattcaccataagatttttctttgatatgttctatatttctttttgagatagatgctgttgaatctccatcaccagaacctgatgatgaaacgtgttgctcggacatattctcttattttaatttttttttatctgaaaaagtgtatatgaataagtatatttgagaaatgaatacactaacagtggtatgctaaagtcaaaacacgacctaagatatatcaactcttgtaaagtatttgtgatttatcgtgtttattatgaggcgaaagagctatataacaagacaagcgcgaagatggtaataatagacggggatcaggaagaaaacaaacgaagaaaagtacacagttataattaattatagggtatttatatgaacctgcaactgtggagagcattacaccaggggggaatacatagtatacagcgtattttagatttcttttattttacacactttttagatgcatatattcttcgaagaaatgtcttctttttcctgggccccctccccctctctctcctcttttcttttcctttcttctcctctatcgccgtcgtcggggtggaagattcacaaaagaaagtaaaaaagcagtgattccttttttttttctttttttttttgttagggtgaagaaattactcattcatttctgaaagacaaaaaagaaaactgttttgaaaaaagtaagtgaacattggggtggaagaagcagaacaaaaaaaaaaggcggtgccaagggcacgtcaacgttttttttttgttatttttttgatgaatgggtataatttattctgtgtgtctgctctgcttcttttctccttttctttctctctcccccccctcttcttcttctacttttttttcatttctatacacgcataggtctggaaacgataaaagtcacagagatggaccaattttgtaccaagaaaatattagataatacaaaacgtaagattttttttctcttgttctttatccttaattcattttcttgcttatctacattaatcagacaatgcaatgcacaattcttaacaatagagatacgtcagaattgattttttcttttactggtctttcttttttgttgttgtgaacacaatatgattcaaacaattatgccagtatgaccacagtttgtaaacaataccaaaagtatatgtcctgtaaaggactaaaaaatagatagaaggaaaggggaagaaaaaccggttacggatttaactttcactatactcagagaaagataaggttttcttttttctgtgccgtcatgagacggcgttgttttctttttcaaacaaattgtccaattgtgaggatgtctgttttttttttttattttttttttttttgcttcttcatatttgtatttgttcgtgggttcgatgttcggaaggaacgttttctcattgattttttttttatagcgcatttttcttttttttttttgtttatcttgctttttgatattttttctttgattataccgtgattacataaatagatacatggttatagtagagaaatcatgctttaatgtcaggtaaaactacatcttcaattggaataaacaattgccactgtctaagatatattttgtaaccaatatatgtcacaatgactattggtcctgctaaataattttggcaaaaattttttaaatcgactccattctctccatcaatgggaaacaatgctacccaaaactggcatccaagtattaaaatagatattagcaacgcaatgatagacccccaaacatctgtcttggatttatatctatcatattccaatatttgttgttctgataccataaatagtcttttttgttcatgtaaaatatagcgaaaccttatatgggaggcacacattgacatccatataaagatttgtgataagccagagacactcaataaccatatgaacacctcttctcttttatcactggtggcaacaaagcctaaacagccaaaaataatcactatcgtaaaacatattaacggtcttcctctttgatcaatatattgcaacgttttgggtaatataccctcttgtgataatgataacaatagtcttggagcagcgtacaatgagctgtttgccactgatattaccgctatcagtattacagaattgataatatgggggattattttgatcccatgtaactcgattgcaattacaaagggagaagatgttgttgttgttgttgttgctgatgttgaggagtcactggaggaagaaactgaacccattaacttcggatcattgtaaggcaccaagaaacatattattaccaatgttaataaatatattagtaaaatcctgataattatcacttttgttgcccttggaatagatatttctggattcttctgttctgcagcagtcaatatcaccgtctccactccaccataactgaatgcagcatagcagaatacaacagatacacctttgaaaccatttgcaaacaatccgggatccttccaatatttatttccaagatacccactcgtacctacgccaccagcaatgataattatacccaaaatgataaacccacatatcattaatattttgcatatattgaaaatgaattcggcttccacataacctttggcgccgcctagattaattagtataacacagagaaagattattagtacaaaccagtctaaattgattgatacttcccaccattcgactaccattgcagctgtcactaactgtaatggcaagacagttatccattgaaaggtgtagataatagagattgcaaaaccgaatgcaggatcaactaataaacttgggtaccttgtgaaattaccaaccattcgacaatagacaactcctaattctccagcgctttgaataatcaggtataccatgatagaagacacaatatacccgatcattagacccaaaggacccgactgagataacactttgcctgtacctactaataaacccgttccaattccagtccctagagaaatcattactgtgtgacgttgtttgataatatgttctaattcatcactatttttttctagatcattatttgaatttcgttttttaaatgatttaataaaactattgggtaataatattgattttattgatttcttatgaatctttttattcggttgtcttgggtcctcttcttcttcttcttcttcttctttttcctcattttcaataatcaactcatctttatttttatttaatctaatagaaatttcactcttgatatcttttaacatctttcacctatgtatgtctgactcatgattatattaaataaaatgatgaacaaaaaggcagaaaagagtggaagacttgataggtggctgttaatattaatttacaatatgtgttttttttatacccccacttaaaaagtgatatatttatgtcataaatattttttagtgatagtagtagaaacagtggtaataatgatagcacaaaaatatatagcaatattaaattgtgatatacacatacacacgcatatttcactataatcgtacgttaggttttttttttgtatatcaaaacaaagcgatgagatgaaacaaaaatttataaaagtccgaatttttttacttttttttttgtcttttgctttttttttacccctttaggtatttatacgtattaaataggcgatggcaaactcgaagaaatagaagaaaaaactttttgaaatttttttttactataggaaagagaagactttttttttttgattttatttagaaagctacatggcgcttaaaatatgtgtatattttactatctgaagacacatatacatatacatctatacatacgtacatgcatatgatttactacttcctgcaactatttttttttctttcttaggatactttgatatagacactgtctcttatcctctatgattcccctccctaaatatgaaaacaaaccattcaaacctccaagaagaattaatacaaattatgttacaaagaaggacctgcctacgaagaagattcaaagtaagatttctactcagtctctaacaaatgtggtcagcaatttgaataattctttaaataatgttcaatgttttactatgatgcataggaaattttctaacaagaagataaagacatggactggtgatgggtatgccatctataagaagctttcagagaataaattggttttttatgatgagtctggtcaatatatgacaagtttgattgtcacaagagacgatgaatcaagaatactggataccgtttttaaaagtaaaggttgggagtttcaaatagattatagactagttaaaaatgacgaattaatgaatttacaggaattgttaagaggtaataataagcaagaaaattcagttatcaacgaaactaaaccatctatgcatgcatcatcatcagggatttctaaatcaaatgtttctgtttcgcaattgtttaaccaaagcacagtgaaaagttttaaatcagtcattaaaaaatcagaagtttacacaccattatctttacaaaccaatcaaaaagttgcatttactaataacaatctgaatacaaaacattataaaccagtatttgatattacaaaaatattaaaccctattattatgaataagtgtaaagaggcagatgtagacgtcattgtggatccctttttaggaaagcttttaagaaaacatcaacaggaaggtgtcaaatttatatatgactgtctactgggattgcaacagtcaaatacaacagatattcccatagacaaaagtcttcttttggaatatgattctgatatttccggttgtcttcttgcggatgatatgggacttggtaaaacattgatgactatcactataatttggactctgttgaaacaaaccccctttgcttctaaggttgaatgctcgcaatctggtgtcccactaaatggtctttgtaagaaagtgctgatagtttgtccggtcacattaataggcaattgggttaaagaatttcataaatggttgggaatgaataaagttggtgtattgaccctttcatcacataatacagttgatatggataaaactgccgtcaaaaattttttaagagttcagaaatcatatcaggttttaattgttgggtatgaaaagcttttgaacttatcaaatgaattgcaatgcaaaaagggatctccaatgaatgttgatttgttagtctgtgatgaaggtcacagactgaaaaatagcacatcaaaaatattgaatgtgttgaaagagttggacattaaaagaaaaattctattatcagggacaccaattcagaatgatttaacagaattttatacaattgccgattttattaacccaggaatttttgggtcatttcaattctttaaaaaaaggtttattatacccatttcaaaagcaagagagacgtccaatagtttcaatgaagatattcaagaacttggtgaagaacggtcaaaggaactgatagaaattacaaaaagatttacattaagaagaactaatgatatcttacataaatatttacctccaaagacggatattatcgttttttgtaaaccgacacagattcaactttctgcattttatacaattttacaagaatctcaattagatttttctcatatgacaatgaattcttcattaggactaataactttaatgaaaaaagtatgcaattcgccgtcgttgttacaaaatgattcttattataattcaatgattaataataatgaaactaaagctaaatatggtcatatcatagattcaggtaaattaaaagtattgatttctcttctggaacagatacagaaagagacatcaaatgaaaaagtagtcattgtgtctaattacactcaaacactggatattatagaaaatatcttacactctaggcaaatgtctttatctagattagatggtagcacaccacagaaattacgggactccatagtagcaactttcaatagaagcaaatcaatctttgcttttttgttaagttctaaatcaggtggtgtagggttaaatttaattggtgcatcaagattgattttatttgataatgattggaacccttcagttgatttgcaagctatgtctcggattcatagacaaggacaagaaagaccttgctatatttatagactagttactaccggttgtattgatgaaaagatattacaaaggcaattaatgaaacatagtttgagtcaaaaattcttggatagtgaaaaaaagaagataaattataaggataatctttttagtcaagaagatttgaaagatttattcactattcttacagatacaaaatctaacacgcatgatttaatatgttcatgtgaaggagagggtacaggatttcttaacaggaaagaatcccttaatataacagatcatgttgtttctaaagaaggtgattgtaaacaggaacataaaatgaaactgacccagtggacaagtggtttagaggttaaaaaaataatggagaatttgcagtcacaagagaaaaacaaacagacaaagtttattaaagagtgtttggtaggttacaaacatataaacccaacaaaaacaacaaaactacgcgacatcgttgttgcaaaaagtgttaaaaaaatgtctgatacaataagttttctcttcattaaagaaggaaatcgtcttgacgaagatattacttaattctgaattgaaaatgtaaggggaatcttccaattatattttgtttcttctttgtccgtcattacttaaatttcctatcaataagtacttcgtttagctcctaactaaaaatggaggtcttttatatacctctggaatagatatatgtatgttgaagaataatcacctaactatcaaaaaaagcatttacatttcaaataattttctttctttcaagccattaatttgaatatataatataaactatatatattatgttgttgaaatttttgatttcactaatattgttcaatattatagactgtttttagagaatgtgaaggactttttttattatctatcttgtaatttttaatttgatatctattattttgatatttttgttttttctttcttttctttttagtacttctgggaagagaagatagcaagacttctttatcagcactatgaatcaacacataactgttaaaaacaagaatctcggatattctatcatttttttaaaacttctgtatgtttatgatcattttataatcctcttttttcgtcattcgtgtcctagtgctacatttctttaatatttggtaatatcaagtagtgtgaacaaaataaaaaggttccataagaaggaatatagattgtagatagcataaatattattacttaagtatcaccttcaatattaaatacacaattctatgtcaattacaaaatttttaagtttaatatttgggtatagaaagactaatacttctctgctcttttttattggatctttatttatttttcttctttatttatggaatgaaattggatataaatataccttaccaccagttgatagcccaattcctataagaccttatttagaaagatcatggaattatttacaagatattacattttccttccatccttatacttcaagggataatgaccgtgtacatgattatatttggaatcgggttaatgaaataacacacgacgttaattatgcagaactacaagatgatatgcacaatgaatcatatagtttgtgtaagcagcaagatgttttcaatataagttctactagaacaagagtcatatattttgaatcatcaaatatactagtaaaattggaaggtaaagacccatctctatcagcacttttgttatcgtcacattttgattcagttccaacatcacatggtgctacagatgatggaaaaggtgtggcatcaatgttagctttactagaatattattctttaaatcaaccaaggaggactttgatttttaattttaataatgacgaagaatttggtttattaggtgcctctcactttttgaatcatgaatggtcgagtttggtagaatatttcattaatttagaaggtatggggacgggcagtaaggctgttatgtttagaacatctgatattgacacagcaaggatatacaaagacgctgtgaaaatacaaccattcggtaattctattttccaagaagggtttaatagaagggttttatcaagcgaaactgattataaagtttatgttaatgctgggtatcgtggttgggatatagcgttttataaaccaagagacctttatcataccaagagtgatgatattaaacatacatcaaaggaagctttgtggaacatgttatttatatcttggcaattgtcttccttcttaagtaaaatggacgatgtttcttcgtttaacaataatccggcaatatattttgatataatggggttatactttttcaccttgagtggatatgacttatttattattaactttattcttattatagtgtctcctctgttgttgattgttctatatattttaaccaaaaataaacatcaattgcataattccaatattgtaacatggttaagactgcccttttgtgtaactattgctattggttctataaatgtaactgaagtatttatgagggatatgaacccatttattgtattccgtcattcatatactccattatttactttattgttggaatttttacttattattttaatcattgatcctataatcgcttttttttggcctgatgataaaattaaagatattaatttgattgaaataactgcagtattctggttagttatgttgtacacaactgtcagtctttatttaagtgaatatcagaatacaggtgtttacttatttactttgatttttgtaggattgtcactcacgctttttgtgaaatttatggcaacattattatacaaaatagccccaaaaaatacatctatcgtgtctagttctagatctacctctggttctagttatgatagtacgatacagggacaaaatagcgaagaagttgaagaaacatcaagaacatcggtttccaatagtgtagaagacgaaagagctcctttgattgataccgtaccggatctgtatcaagagaatgaagcatcatcgaaaattcaaactactccaaagataactagaagtcaatacgagtggaccattcagctggttattattttcttaatattacttataacatatcaaagcattcttcaagtactagatgcaacatctcaaacggttattggatcaaataagtccttagatattgtttgggatatattgtttcttggaacaattatcttaggcttactttattcaccatttttgaatttaagaattgagttgatctctcttattatcgtaatatttttagggctatttgtaactaatatttttgaaaccccgtttacagcaactaccccattgcaaataaaatttagtcaagatttggatggattggttacacttggtggtgttggtactaatttaggctacattaagcattttgttttagatttaccaagttttagacaaggttctggatggatagattgtgactatcaaatgcagacatgtacttatcaaggtatacctcccaatctgatagactgggattcaaacaatggtgaaccagatatcatgtctattcaagtattaagaaatgaccggaaagatggaagccgttctaaatacgagccaatatatgcagatatcatgttacatgtgaaagaaaacagagcatgcagtgtttattttaatgggactggaagtgatatttccagtgttaaggaagtgattatctatgaagataaccataataaagttcttgatacatttaaatggagcaaaggtattgaagagctacaactccacaaattggattttgataaacaatattatcatataggaattcgctggtttccgaaaatcttgtcaactgatagtcttatggctaaagacagtatcttatcaaagaatagtagtgatattgaggatattgataaattggggatgacagtaatatgttactggggtgaatacgatgaagaagttataattgacggcgaacatagaagaaaagtaccggcgttcgatgaattgttaacatatgctccaatagattattcttttagtaatagagaaaagggaatggttcaccaaaagaaatacatagaattatgatgtgtaataaaagttatgtagatataatacaaaaatatatatatagaatatataacttgtttcacctgttgggttgtattcaatgaatatagacaattgaaataccttagaagggagtggacaaatttttcaaagtttaatttttaaattagtgtatatttaaattatgtgtttggcgtatatcccaaaaataacaaatttacgatcaggtcgttagtatatatagtacaaatgaaagacaacttttgataaggcgtttgattattagtagatgtgtttttgtttacatcatgggagagttattattagtaatggtattatatctttctatagtattttcattgctaacatcagcagtgagtggatgatcaatatgagttatgaatgacattttgccattttgtttttcctgtggaataatcataaatttattagcgtcaggatatgcttctggatcagatattgtagtattttcaaacccagtatttttagagtctggacacatagttggaaaaaaaacttggttaggaaccagttggatagtgtttataggtgctccatacgtaactgtattttctgtgtaattgagaggtctataacctaatccatacggatagctatttgcatttgtatcaactaattgagaaatattattcgatactattaccggtgtatgttgactttgcgacatttgaatattgtcaataatgatatccaattcaggatctgtgatgttaacaggatccaattcatattcacaagtaaatacttgttgatcttgatatgtttcaaattctgttagaagttcaaatggaacatcaggaattgtataatctattttaacatttttctttgatgttgaggaagaactcttttcactatctgagagcccttcttcgctatttattatttcttgaactgtccttgattctttcaaacgtctatacttaatttgtgaatcctgtagtctgcctttgattgtttctaattcattaatatgcattttatctttttccattctgaagatatttatagcttcattaatggcagaaatagcgttatttatttggttcgtagcacaatatacctgtgatataccaaaccaggctaaagcagcaaattttttataaaatttaacttcaaatatactacagctttgtaaaatttcacttgaggaagctagaccagctgcttgtaaatatgtggataatgcatcttcatattggcatagatcaaaataaagtgaagctattgatatccaaattatcggatctgtaggtataatactcaatgcatcttgataatagttgtaggtagtctcaatatcttcatcagttgaattttgtaagactaatctacctaatgcataaaagaattttggtttaactgtgtcagtaatgattggtatctccatttttaacctttctacaaaatttttcccatcttttgggttgtgaattgttcttatatacgcttccaatataagaaatttttgtaagtaaaaggcaggtaattgaaaattggtatgaacttctttgattagttttaaagccagttcaaaatctgaattatgtaagaattccacagtaattagaaaataataacaatacgcaaccttatgtgagagatcttctcttttaaacctcgctttattttcatttagaatagttaaacattggatcaaatcttgtctacatttatccactacattatatttgcggaacatttgtgctctcgtgatcagtacttctaagtacaatgatgtatttttatgaaaatcgatttgtgataatgccatttggaaatcagaaagtaataaagatatggaatgagtcttttcggaggctaataaggaaattctacaatttaatacaaaaattttatatttcaaagtttcctcttcttttttcggcagtaagacagtatatggtataatatgtttactggtattattctcatcattgctaatagtagtgttattattgatgttggtattattggtagactttgtgtttagttcgtcatttcccacattaccaggaatactattagtagtagtattaggattaaaagaattaaatgttgtatttatattccctttgatgaatttttttgcatatgaagaagaagtatattctaaatttgcttgttgtctttcataagctaatctaggtgacgatacggagcttaaagcttgcgctatagcgtggtgtgcatcatcatatttatttaatttataatatgcaaaagccaattgtttccaaagtctataatcattaacaatatagtccatttttgaattgatagcatccattaacaagtgtatgacattaatataatttctatttttcaaatatgcattacctagtaataatatatttctaatatctacagaatcatatgataaaagttttgataataaagaaaacgtcataggtaacatgttcatatttaatgctagactactgcattttcgaagtatatcagaactgagttgttggaagtcatctgtttccattagttaaaaaaagataaaatatctgtatatgataattgaattattattagtctttgttttttaagaacacgatatttttgatgtatacgcaatcagaaacagttaacaatcatatatcggcttattattattgcctttatttttttgttatgtatgtatgtgtgaatgtctttaatgaattttaaacactatagtaatgaaaaataaaacagatattatttgaaaacaatttattactcttgtcttttttgttattactttaattatatttgggtatcagtacaggatatatatctctatatatatatgtttgtttgtttgtttgtttgtttcgtattatctcgtgtaaaggaaatgtgtaggcttgtatttacttgtatttaatacaatttactgtatttccatagaatggcgaaaatatgggtgtatttatatatgtaggtatgtacgtatgtatgtatgtatataatgtgtaagtgtataggaaaattgttaggaaatctcacgtcaatgaatccaaataaggaaaatattaaactgataggtagtgtaaacaaaacaatctaataataaatccaaaatagaaaatatgggatagcgttaaaataataataaaccactcatgagcataggaaaaagtttctagaaggtatatcagaaataagagaaagagggaaagaaaaaaagatagtaagaaaatgcagaaggtgtaatagaaaacatacatataaatatagttgaaacgtagagcaacgcataatgtcaaattttatttttcaggaaagtcatgaattaattgggaggagaaacgagaaagtgtgggagatattaacaataatcacaaaactttttgcttgaagaaaaaacaaaaagttgagatctgcaaaaaaatagaaattctttactacggtttttctatagtattagaataataggcctcctgtttaaccccttggtggttgcataacacaatcagggccaaaagtatcatgtttacaaatagaacaatacacttctgaaaatttgtcaaaaataaaaaatattagaaaaaataaacacaaaagttaaaaaaaccaaaaataaataggtttttttttaacaattaggtgacttcttggtatatattgttcttttgtatttttttctgtgttatcgttttttaataataaaactttaatttttacaaaaggctcggataaagtttaaaattgggatgccaaaaaaacaaaaaaagctattatttagagaaatcggtgttttcttttttcatttttatttttatttttttttatattgtttaagaaattggactttattggcaaattgctatttttttctttgacttgaaacaaaagaaaaatagaaacaaaaggaaaacgcaaagtatgagggaagtaaaaggacataaaagatggtaaaatagaatataagaatatacggtaaatatcataagaactttttacatgttcaggttgggtaaaagagctctttttttttttttcaataaacaaaaaaggaaaaaagaataaaaaatacaaagaaaaatcaataacatgttaagaagtattatcggacattacaaagttttattctttgcgagtttctgtctggctcgtttgaaagagatttcctcctgtgtcaaggaaagaaatggcaaataatgttagattttatcaatttttcaaagtatttagtatcacgatacagtaatataagaacttatgttctatatacatttgtatatgattaaattaagaaaataaactgaataaagaaaaaagaaagaggaaagaaggtggagcaaagatgagttaaatttttgatggctaaacttttattatagacaacaatagtttggaaaaaaatttacttactttcttatttgttttatgatcctatgatagtattgttgtccaatgagagagttattatccagaaaggatttttcttttgtcaattcaatattataaagctattttagtttgaatcttattgtattggtattagatatttttggttaagtgagttgtgaaagtaataaaactatactacttctccttttcttattttttttttctttttcctttttgttcttacatatttaatagtagaaaccacttggtaaggtaataatggaaaaaactgaaaagtttatgatgacatttaaaaatgttaagtctttcccctcttatttctgttttaatttatattgcaatctttaacttttatactcaatattctgtaattagaaccaaaaaaaaggagttaataaaaagggtggaaattttgagtaaaaaaacaatctgaatttcatatgatataacggctcattgacactggtaaccatttcaattcttaacatttttttttctgtatcaacggacatagttttttgacttgatgtgttaaagattaaagtattattcttttagaattattttacacattatgtatttgatatgattatgattcatatttttatttaatccgcttttgtattcttttttttttttgctcaaagttttatcaagtcaaacataggtacaaaataaattataatatttaattatcttttttatgattttttagctgttttgactgaaatttatcaacgtgtagaataatcttatccataagtcgcttacatctttgaaattcagatttaccttctagtggtttaggaaaacacaagggttatgtgtctgctgttttgtgtaaatgcagaattattttttaaataaaggtataaagttatttagcttattttatttttatgatttcatagtcatttattcgatccattcttgttgaatatcttaattgtattatttaaaagtggtgtttatacagctatatatatgtatatatattgtattgtattgttcttttaatatacaagaggaggaaaggaagatgagaggataacaataggagaaagtttatttagttagtctactattatttgaaaaatcccattccttcatatacatcttagcccaggcctgaaaatcaggatcatcgaatatttgatatggtatattccattttctgaatagttttgcagtatcaatgaatgctttttctgccaaagtgaaatcatatacatttgcgtttctctcgattggcacttcctctgcctttgtagaaggtattgcgacaggaactttgggaagacttgcaaccccaattctattcttggttataattctgtagatatctgagcttaatctttggacgtttggtctatcgaaacatagcatagttggtatttgacttaagtcaatggttcttatatcatgatcaattttgaaatgtttttccattgctttggttctatcctttgattgttgcaatttatttttgaatgtgatgattttgttgcatacgtgtccattatgatggtattggcataagatatcaaattcattataaaatgtgaaaaataatgaatatatattagcatttttacgattcttccacaatagagggaaatcacttgagtccaattcagggttgttatctaagatacaggtacaaacaaggcctggatgtctgtgttcaggcaatacagcaggttcatcggttacttcttcattttcaccagtagtttcatgttcatgttcatgttcagtttcgttattattttcatgttcatggtcatgttcaagcatagatgaagatgcaataccttcagtctcggtggataataagtttggattattctctgccaaagcttttaaaagtgtttcattgatgacctcatcttcttttaattcgtcgattggtgtaacgaagagattacccggtttaaggtcttcaaaataaaacttattctcactttctaaagggtaataaagtctttctttgccggagtccttcgaacacaatctaataaaagaacaaaccacttctttgtttgggattacttctctaccattgaaaaattgttgggttggttcatgtttaacataggctagttttcttccgtctctaacgataagatgatatggagacattgtttattttatttgttttatttggttttttttttcccggagatttataatttggtgaagtcctgtctattagaatgaaggaaggggagatggtagaaagaaggaaagaaaaaaagaaaaaaaaaatagtgtgtgtaacacaataaaagggaggataccgtaaaggaaagtgagcctagctagacaaataaattccgattgaagattatggatataagatatttggagtagagtaatacaaaatatattttaatatatatttttaataagcgtatacatgcacacctataaattatattggaggcaagtctatgcaaactgaaacaagagccaaggaatagatttcaagtaaacaaacacgatattttccactatccccccacacaaccgaggtgaagcggagggaggaaggaaatgaagagaaaagagaaagaaaaaacattccgtttaaatacgtcaggtgcgggatggcaagaagcgacgcggaaatagatatccgtgatcagatttgtctgtttttttcttttttttccctttttttttttggtttttttttgtttttcgttttactatacgctcacactgtacgggtaattcagcaatactcaaagggggacgggaagggagggaagagaggcagtttctttttctttcctttttttctgtttgtatagtagaataaatacaaatgccgtttatttattccgctggaaatgcccggtattaagagaattttggccagtttttggcgggtttaaattttgtaacaaagaagaaaaatcatcttacttttttcttttttcttttttttttttttttttgtctgcgtcctttttgtccatcgtcaggttttttcttcctccttcgttttcgttggtgaaaccaaaggacaaataaataaattaataaattaataaatgagccactataatgtattatgaaattgtataattagtcgtttaatataccgaaccgtcatcttcatcttgttatttttttttctttttattcatgattactagtgtactaccccatagacacatttgatagtaaccgttagggggaacagaaggatagaagttgatacacatggatattacttataatgagaatctatgtcataaagatgcagcaattgattatctgaaagctttcaaccttgtgtaatttgaataggtactcgtctattatcaattttctaatatgttatcagggcatgtcgatttaaaatgtttctacataaatccttgtaggatatgacacgacccaaatatcacttatctagccttagatctaatttgtatagtagagtagactacatattaaaccaatcttataattggctttggtcatgcttttccctcctttttcttttttttttcggttaaactttaaagtggtgttgtttttctattcttttctctcgccccttcctctcctctcaatcctctcggttgtattggaaataccaaattgtattagaaaattagaatgagggctactctacctagaaattatgatattaattaatcttcatcactgtatggttattttcctttgaagtaatgaacaaagaccacagtcattcaaataaggtaaataacttctaaatatgctatccagatataaacatggagtggtagcaagaagtagaagcggaacaagaacacaagaattgaatatatatatatatatatgtatgtgtgtgtgtgtgtgtataattacagtgtaataaagaggaagcaaaaagtaattaaaaattatgaaaataatgaactaaattaggatagctatatttgatataaaaaagagaaaacatagtaaagaaaaagaaagaaggtttttttttgtttttttgtttttattgttttttatttttattgttttttgttttttttgttttttttttgttttttgttgttttttttgttttttttttgttttttgttgttttttttgttgtttttttgcagaaaacaccttacaaattgtcaatctagtaatacaatcaatttgtgctcggaggcaatccaatataaactggtacaactaagttgtggataactatcagtctaaaaaaaataatcctgtcagacattcggtggttactgtcttagtacagggtatgatttgatatattaaattttttatgatttatttaacttgtatgtctttgtgaaaccaggttttttgtaaatattagaggactgcttattttaaattgggaaacagcatttaatgtcgcatcctgttaacaccaatactatgaatgaagctattaagtaatatttttttatgacgtagagtagaacgaaatgtagtaatttattttttgataaggcacaaatttcttccgaaaattggaagaagaagagagcacgaacattacttggttgatgtattgttcgataaatatatctttctatatgagccttgagttgagaacagcgcataaaagactactaaagatgttggttaggaatctttagtgtcttttttccaaagtttggatatggctgaaccgacataattactaccatttcgtatcccatttaggacagtgctgtctaagacaatgcaatctgtcgcaaatgacatatattcacacgatgacttaaaattctccattctacctttccatccatcccgttttaccattttggcaaggacggtttcgaggatgtactcggtatcatcaaacaatgatgaatcatacatagaatcatcgattgggacgtagtaagggtcaaagatttcgactttattagtccccctatctaaatatcgatagggttcattagtaattttgctgttgattagttctctgagccccggtgctaatggtttatcaggataatgctgccttgtctccgacggatctttttggcttggatagacctcatagaactttttcctgacatcatctaccatgtcaggacatagttctggtattttctgtgatttttgcacttcttttggtgctttttgttcctttactatacagctatgtggttgtgaacttgataattctgatggatctttcttatgaaatttaaagaaagatgtaaatttttgtaaaccactttgattatttggtttaggaacattttttgtttcattaaaggaaacagattctgtcttagtggtaacagtagggggtattatattcacaggagttatggtcttaaaattagaaacaatttcttttgctggtattgatgatttctttgtggtatcttcttctttttttgcgaagagtaatttaattttttctataccactcttgggtttctgtgtaacaatattattttgtttagcagaggaagcaggtcctgttttagtaacaacaacagtaggtattgagtccattggagttatatttttggaatgagacacgatttcttgtgttggaactgatgatttttttgtggtatcctccttttcagtagaagagactgcttctgtcttagtgataacagtagggggtattatatttacagggtttatgattttaaaattagaaattatttcctttgttggtattgcagattgatttgtaacatcttcttctttttttgagaagagtaatttatttttttctacatcacttttgtgtttttgtgtacggatatttttttgtttagcagaagaagcaggctctgtcttggtgacaacaacagcaggtgttgaatttactgaagttgtatttttgaaattagatacaatttcttgtgttggaactgatgatttatttgtggtatcttccttttcagtaagggagattggttctgtcttagtgataacaacagggggtattatgttcactggagcaatgattttaaaattagaaatgatttcttttgttggtacggaggatttctttgtaatatcttccttttcagtagaagtggctggttttgtattagcgataacaacagcaggtgttgagtccactggagttatatttttggaatgagacacaattttttttgctggtacaggagatttttgtctgatgtctactttttgtttttcttctgtgtctatggtcttatgtttctcttcaatgtgtttatctcttgatatgatgatgtcccgttttttctcatcaaataattccttcttggactcaccaatgattatcaaagactttgaggcttcgggggaaataggcttaaaggtaactttcttctttatttgttgttttttagtagtttgtttttgcttaagaatataatcttcctttaacagtgattcttcttttacaattgtttttttttttgatacataatcttttcctgtactacatcctagctttggaccttgttcacctttctgtttctttctagatgatttaagaattattgtgttattattggtttgtagcattgtggaacattcttttttgacacaggaaacttcctgcttcttaggtacagaaagttgatatctttctttcatgagatccattgcattagcaaaatgttcttttgcatttctaatattttgttctggaattttgtctaattcgacatatgtgctttcctctttcttgggtatagaaagttgatatctttgtgtcatgagattcattgcctgagtaaaatgttcatttgcatttctaatattttgttctggaatttgttccttcttggcatgtgtaacttcctttttcttgggtacagaaagttgatatctttctttcatgagatccattgccttagcaaaatgttcttttgcatttctaatattttgttctggaatttgttccttcttggcatgtgtaacttcctttttcttgggtacagaaagttgatatctttctttcatgagatccattgccttagcaaaatgttcttttgcatttctaatattttgttctggaattttgtctaattcaacatgtgcgctttcttctttctcgggtacaggaagttgatatctttgtatcatgagattcattgcctgagtaaaatgttctcttgcatttctaatattttgtcttgagatttgtttttgtttactgtgtgtagcttcctttttcttgttttgttttgggatatgtttctttttaacatttgaaacatcttctttctcggtttgttttgagatgtgttctttcttgacaggtgaaacatcttccttcttgttttttttttggatatgttcctgtctactgtgtgtaacttcctttttcctgtcttgttttgagatttgttcgttcttagtatgtgcaacttcctccttcttattttgttttgggatttgttccttcttggcatgtatgacttcctcctttttgggtataaaaagttgatattcctctagcataggagccctcaccttagcaaaacactcttctttatttctaatattttgttctggaattttgtccaacttatcatgtgtgacttcttctttcttcggtatagaaagttggtatccgtctatcaaatgagttcttgtcttactaatattttcttctacgcttctaatattttgttttgggattgttcttggtctaatatatgtaacactccctttgttgggcacaactccttgggatctgttcaactcccatgattccatcatgcatatagcttttttataacctaacctggcagcacatgaaaccgtatatctcttccgtgaatcagctgtagcagtacccagtccaaactgatctatttcataaaagatttgttctaatagtgagtgttctttatctttagtttgtttgtgattcaaataagaatctgcatctttttcaggcatattctcttgaaattcgtccaacattatttgagacttgtccaacccccatgattccatcatgcgtatagcttttttgtaacctagccttgcagcacatgaaaccgtatatctcttccatgaatcagctgtagcagcatctagtccgaactgatctatttcatgaaatatttgttctaatagtgagtgttctttagctttagtttgtttgtggttcaaataagaatatgtatctttttcagacacattcctttgaaatttgtcaaacaccgttacttgtttcttagttaaagtatcttcaggtgttgcatgtttttcctttacagcacactcttttttagtacatgaaattctataacgcttaggaatatctactaagccatatgaaataaccagagttcttagcccagaagtgattcctcctacttgtgaggatggatttgttgatctaaatttcctaagatttggatacgtatttaatgaaacctttttaaaattacttgtatcagtgtgttcataaacaacttgtctgttattcattgatgaaggtttatattttaattgagtttctaaactccaagtatcataaaccatttttgactagaataacttgcaaaataaaacaacaaactgacttttcctaaaaacttttttgtacttaatgaaacactaatatgtatatatataatgtctcttatgtaaaaaagcttgtggtttgttaaaacaaagtgagaaagataataattaatacttaacaaaactaagaaagatacaaatcaaaatatagacacaaactaagaaatgttttataaactagaagaaacaggaagtctttatctatctttttttaacacttatttgtaattgattttgtgacacataaacttcaattaataacgaaaatagcaaagaaaaaatattaattaataaaaaaatagcaaagaaaaaagattaatcggttgattaaataacgagtaaatctctgcatttttgagtgtgtttattttttatccattatatgttgagacgatagaagaaggagtagataaacaagaacctgtttacttaggagcttcttttttagttacctatctattagtttgtctttttgtttcctttctaatggatgtaatgcaaatataaccttgtaattgttcctagcttatatacacttagggtcaaaaagtacaaggtaaaagttgcttgtttgatacaacaatatcatatatcatttattatgtacatgttaatgtaataaatatcgtcgatgcttgggtaagattctaatattttatcgtttctagtctggttattataatcaaaagttcaaagctcattcactacgctgtttgattcctgttcatagaaagcaagaactcatagaattgtatccgatctctagacaaaaaaaaatacgtagagtttttcacaagtaaatatgattatcaccaatctttgtattttctacccaacatttatattcttaaatcactatatcaaataacaaccaaatggattttcctgaaaggttattctgttaaaatattctttttatttttcaaataacataatttttttcgagctatcaactacttatagattatgaaaatgggtaacatttcataatcctttcagataattttttatcgtatttttagtacattcttcctcttgagttgcacaagtaaaattaacatatgacttctagactatgttgatggggaaaacaactctttctatattgttgttgaatatgaaaagtccaatgagagttctatttcgaaagtagtcgattttcctctaatgctaatgtagaatattaaacactgattatacccatatttgttctgattatttgttgcactgttagcttttgatgttaattggttttaaaaatggttcagaaatctactggcattaatattcttcgaatttgataaatttatgtaataaaaggttatttctgttatttttaaaactcacacatacttgattagtgtaacttcttctcaagatgaacctttgataagcaaagacagtgaaggtggatctacataacttttttattgttgatcattccttatattccaattgccaaacaattaactttttctgattcaaaaatatacttctttcggttacactttgttagataataaaggcatatttacagtttgatgttattcttttgtattaatctctctaaaacaatatttaactaaaaaaaaatctttttcagacacagaaaatatacatatacatatatgagtacaattcagtgataacattttttttttattaaatatcttgagaggtgttgcatttatagttcgtgataaaatctatcttttttgttttttcatatataagtatatcaagaaaaaataaaaaataaaaaaacagaaggaaatagagacaagaaacaagaaataataacgataaggaaaaaatatggagccactttaatgataaacaattacaaataagatattagagtttttttcaaagagtttagaatatctctattttaaatattatatcattcaatgtgattttcttgctgtataaataggtatataattatatatatatatataaatgttaaattatatgagtttacatatttccactcacatatggcacagatttagaatagatcagagattttgtaaatgaggattatatcaatacattattggtactataacaacatgattaattacttataatggttgaaatgtttagttaattctttttgattagataaattagtttcattagttacaggttttgctatctttatagtgttcaaaaaaacttctgttgttagacgttcattgtaatttacttttaatattacataagtattaccgaaatagtaagtgaatttatgttaaggttaaaatataatataaattttatatcttaaaaaaacagaagatatctctttggttaaaggtggttaacggtgtttttaaaaatttgttgtaaatgtttttttttaatttcttgaaactgagaatatatgtcccaattataaacattttagatatcaagaagtttattagcaaaataaacaaaacaaaacaaaaagacatattctgacataatattataacaacttatagaaaattgtttctcctctctctcaccagaaaaaaaaaaaaaaaatacataaaaaataaaattactctaaaaacaagaattacaattttcataatatttactttgtcaagctcttcacgaaggaaaaggaatgcaaaaaatgtattatcattagtaacctagcattgttacaaaaatatagaagtaaaaagttacaatatcatttaaaatttcctgagattaatagccattatataaagctaaataatctatatatgtagatttatttatttcagactataatatcctactttatgaaaacatattcgatggaaaaataagacttgaatataaaaaaacaatgctaggaaaagtatttaatatttcaggacatttacataaaattattgaaaaataaggttcctaatcattatggatatatattccatcaattaaatcgaaaagattattctctctactagaaaaaaaaataattagagtcaataagaatatactacctgtttaaaactcaaaagattttcaaatatctaaacttttaaacagcttattatcagttaaatgacgtacataaccgtatagaaataaatgacttcataatttttttacttctctacttactgtttaaaaatcaaaaactttttgtgaatttgcaccgctgatttattttgttatgcctctttgtcaagaaatttcttagttcacgtgatctttgaaatgaatctcctggattgatttacagaattttacacataatatctgtttcacaaaggatcgaagaaggtcatgaggctcagaatagggcgcagacgcagtcatatacagtagaaacataactatagaatacggttctagaaatataaaacctaaatttttcttgcaacattcaacagttggtctcctcttccttcttcactgccttccccatcataaccacgtcacatatacataaagagtaatatagtatatatccaaaagataagtactagaaaaaagttacaaaatacaattattaatatttttaccaaatgtatccaggttccagaaactacagttatagaaacaataactataataattctaatgatagatatgagaggtctgattacccccctccacaacaacagtatgcaagaccacctgtcccgccaccaggatttgtgaaccatcgcgataataatggttactctagaccaccttcacgtccaccaatgcagcaacccaataagggctatcaaagttatgaagataatggatattatccaacactaaataacccaccacattccatttcaaatccacaatatgaaaatgctccatctcactactcccaaccaacatatttacaagcaccaccacaagaagcacaatcatacagtgttaatcaaaccaatcaacaatttagttactcccaatgtactggacgtcgtaaagccttaattattggtataaattattttggttcaaagaatgagttacgtggatgtattaatgatgcgcataacatttttaactttttaactactagatacggatattctgcagatgatattgtcatattgactgatgaccaacaaaacatggtctctgtacccactagagccaatatgattagagctatgcagtggttggtcaaagatgctcaacctaacgattccttatttttccactattctggccacggtggattaactaaggatcttgatggtgatgaagagagtggatacgattctgttatttatcctgtggattttgaaatcaatggacatatcgtagatgatgaaatgcatgaaattatggttagaccattatcacaaggtgtaagactaactgctctatttgattcgtgtcattctggtagtgtcttggatttaccgtattgttattctaccaaaggtgtagtcaaggaacctaacatgtggaaagatgttggatctggtgggttacaagcagcaatggcatatgctactgggaatagagcagctttaatcagttcgttaactagtattgctggtgttgtaaagaactcaatgactaataacgtggacagagaccgtgtaaggcagtacaaattttctgcagctgacgttgtcatgttttcaggttcaaaagatgaccaaacctctgctgatgcagttgaagacggtaagaatatcggtgctatgtcatgggcatttatcacagtattgactcaacaacctcagcaatcttatttatcacttttacaaaacatgagacaagagttatctggtaaatatactcaaaaaccacagctatcggcgtcacatccaatggatgtaaacttacaatttatattttaagtcaataatcgttattattccttgtaccacatcattcttatcttgtttcctttctatttcttttttagatttttagttaaatgtcaaacataatatatataaacccaacatttagtaattatataaaatagagatgcactttttactggttagaatcattattaccattatcaacttaactgtaattgatgagaatatggagcatatccttaaaaaaaaatttttttatatctacatagcatattattatacaaagtaataatcaaacgctaagaaaagacataactattgggaattcaattgtatatatttactagagaataaaatattgaaagaaaacatataggcaagataaggtaaaggatatttcacactttacaaaaatccctactctttaattagaatctttctctaattcttgttgttcttttaatctcttttcttctaaatctttcttaatcttttcttctttagcatcatatttagccttacattccttaatttcctcttcagcatcagcaatgttcttagtggtttgttcttcttgtctagatttataatcttccaattttgtctttaattcttctatagtctttgcaacatcatcatttgatattgggacaataacatctaattcagccaaggtggcaattaatgttggctctaaggagaacttaccatcaatcttgctaaaaatattggattcaccttgattagcagcagacttagatttgctcttcttcttatatttcttagacttggatggagctgtattggtgtaaccatcatccttcttctcaaccatgacaaggtcactagcttcaacttttctgatatttgtttttgtatctaaggatctatcagtaacttcacttaaaacattcttctttggtttttcaaaagttggatctaataacaccaaacaattttcaattgcttcaatttcataagtaaaagctggtgttttagcatgggttaatttctcctgcaacttacttaaagcaccttccttttcttccaagactttagatagcaactgatcttgttcacgctttaaacgttccttttctaatttgctcttgaaagccttaaattcattatcaaaatcagttctaatttgtctaatttgggcgtaaatttcatcacgtctcttgtataaggctgtacgtttgttgtaaagagcttgtctcttatcgtaaacagcttgagatgatgcttgcaactcatctaatttcttttgattttgttcaaacttattggacatttctcttgaatttaatgtggataattgctctttcaactcagcaatcttagccttgtcggtatcaatagatttcttgattggttcaaccaaagttagatctttcattaatttattcaaagattgcatttctttaaccatcattttttcttctacaatggaaagatcaccggaaccaataatgtcttcgatttcagcaattctttgcttagctgcagcagtagagttgtattggtttttcttacccaatctatcgttaatttcgttagtctttctcttaatttgggcatctaactgtttaatggtgtcgtggatattgtttctacgagtttttagattagcttgagttttaatgatttctttgttttcatccaataaactctttctttcattagcagtcttgtcattgatttgatattgatcaatttgctttcttaataaagtgatttcttgatccactttctttaattggacattcaaggtgtccaatttcctgtctctgacagaaacatctggacgtttaatcttttggaaattgttattattagacttaccctttggtgtggaagacatgtttatatccttagttatactagataatatatgcttctatttaaatagtatatacctatatatggatatgcaaagaaaccagccaagatatgacgaaatcgaatgattatcaatatgtacaagacaataataacaaaatcttcagtaacaaggataaatacagaatcgaaaatcctgtctacaaaggaaataaacaaaactatctttagatgaaatactaacttttcttgacaaagccttttttgtttttttttttcgagcaaacccaaaaataaagtttcgaaaagacaaaagaaaaaaaataatttcaacaaaaattttcgagattaaatccgggtagtgattttggtacgtgatagcgccattaatagtaggattctacgattctgaagaaggtagtaaattggacaaaagtattgctgttgcaacactaacatttaatgaatcaatgtttgattgggactctacaggtccaccaaaaggtatctggacagcaaaatcactctttaattgtaaattagtcctaacgccacgcccttcattccctacaacaagcataactggaccatgttctaataaaccatgcatatctgttaagggtaatttagatatctgagtcttcttgttattttgttctatacaactggtaataaaagtccattgccctttcttttgagatttatcaaaaaatgtcaaaggtttatcaaccatataaattgggatatactccattgcaccactactacatttgttcactacaggcgacaattgtgcgcaatttcttcttgagattactataaaatcaactcctaaatagaacgaggttcttagtattgcacctaagttatgtgtatcagtaacttcatctagataaacaccaagtggatacaatttattagagttttgctttaacatatatttacaatgcacaatattcttatgtgatgatgctaataccggggaatcgaattcattttgatatgtattaatttgaaaagttgcatcctccatattcacaggtcctaaatgagtaatttctaatgggtctaacggttttacttctaatacaagaccattatgtacagaatttttggtcaacaaggtcaattcatgcttatttgtcaagactgttttcaaatttttttcctttatcaatcgtgacaattgtggattatttttcaaaacagagtcatttgaatatagtaatctataaaaattctttctatttttattcattaatgcagctataacacagtttttcccataaatgtactccaaaagagaagatttactgattgtgtttctttgtttggtggtactaaggttgttaatatatttttgtttatgagatatcctttcttgttttttcaattcatgcaattttgccaattgttccaaataagcttgttttttcttctgcttagcatgaatatgtgcatatttttttttgaaccatgtctctctatctgggaacccatctctttcccatggtttggtttttttattgactataccatcgaatttcttatcaaatgatgttttcttcaccgtattaatcgctatagatgagactcgtctaagagtgggtaatctaaagagatctagagaccttattttattaagtattatcatttgtgaaatttacaagtattattataatcctgttctttatttttttattctattttttttcttctttttctttttctttttgttgtatattttgtatattagttccagttattataatagaacaatttcagtcaactggcagtccataagacaagaagagtcgtattacagttcattctatagccattgggttctatacacctgttcctttttcattttgcgttttacattttgcgcttcgcatgccattcatgattctctttttattttcctttttcttatttttcttatttttcttttttcttctttccgcgtcataaatgaatcatgattcataaacttgttccagtatataacatcagtggttcactttggatacatggagacaaatacagttaaacgttagccatctctgtacacatacatttacttaaaaacacacacttttgaagcatataaatgattatgtgtataaaataattaaacaaacaagcaaataatttactatgtcccaacaagcatttgtatctcgtataaccaatgaaactaaaattcaaattgcaatttcgttaaaaggcgggccaattgaattaccaaactccatcctacccccaaaacaaaccgttgaagaagatgttgcatcacaaaagacccaatcccaagttatcaacattcacacaggtgttggatttttggaccatatgattcatgccttagctaaacattctggatggtctcttatcgtggaatgtattggtgatttacatatcgatgaccaccataccactgaagattgcggtattgcgttgggtacagcattcaatgatgccttaggtgctgtcagaggtgtcaaaagatttggcactgggtttgccccattagatgaagctttatctcgtgcagttgtagatttatcaaatagaccatatgcagttgtgaatttagggttaaaaagagaaaaaattggagacttatcctgtgagatgatccctcatttcttagagagttttgccgaggcagccagaattaccatgcacgtggattgtttgcggggtttcaacgatcatcatagaagtgaaagcgctttcaaagcattagctgtcgcattaagagaagcgatttctccaaatggtactaatgatgttccttctacaaaaggagttctaatgtaagaaaaaaaagaaagaaaaaaaaataaagaataatatacatctaatagcactaaacaattaacaacaccattatccttacatttatatttatatctattttatatttattttatataatttaatgtctctcctgttgaacaaaaaaaaaaaaagaaaagaaaaaaaagaagaactgtatttatggccatcaactaagtattatgtaatcacgattactaatcgcagaacagaaattctgtggagaaactgtgaagtcgtgtgacgtgatctgaaaaaagtaaataaataaaaaaagtaagaaaatggaaatggaaaattttttttttttgctttttttttttgttttttgtttatcatttcggtcagcgaaaaaaacatcataaacttacttcaaacctcacattgtttgtatttcctcaaccacttttatatctaaaacgttttaaaaccctattttcagtcagtcactttactaagcaaaagttttcctctaaaataataataataataataataataataacaaagtcaagatctgtgtaaaatatatttgtattctttttttctttttgtttttgtttttaaaaatttcactttgtatcaacaacaagaaatatgtattccctattactttgtcaacttacatcaaattctaaaaaggaaaaaatctcgaatatttcacaattaattctaacattcctcctagataaatcttatcctattcatcattatcttaagcctagataatgttttacaatattctggaatgttccaattatttataatgcataatatttatatttttacccttcttatactgacctaccaatatttcaataaagatgaaagtgtataccgctcctttttttttgtcccccccacaaacaaaatatagagaccctaataattttcataatctttacagaaacaattcaaatattattgaatagaccctattaacccatacaccatttttacttattcaattccagaaatttctttacttttcttttttctttctttttttttttgaaaatttatatcttctccaagagatttataaagcatacactaatgtttatatatcctattcctattaccacttggttaaatcttgaagcatcttctaatttcaaacattaattaatatatgctgattcaaagagtctgctatcctattttactttttaaaacaaaaaaaaaagaaatagttgaccagcagatactactgtgataattgaataccaaattattccatagaataaagtagtgcaaacatgactgaattaaatgaaaagatgcaaaatttgtctattcaagaatcaagcaatggtggaaacagtggatatgttcctccacatttaagaaatggtaacagaaagtcaagatctccagaaaatcaaggacctaatgatttcggtggtaaccgtggcaaccacagtggttcattctttggatttaacaaccagagaaatggtggatacaatggtaacaaccgtggtggatttggtggtaaccgtgacaactatggcagaaacaatttcttcaacaatggttacaacaaatacaacaacaactatggcaataatcactacaacaacagcaactggggtccaaaacctgcttttaacagaggtgcctggattgatgggaaacatgtgcctggtaaacataatccaaaattggaattggaattattcggtacagcagatgatccaaaattccaatcctctggtattaatttcgataattatgatgaaattccagttgaagcttctggtaaagatgttccagaaccaatcacagaattcacttctccacctttagacgaactactaatggaaaacattaaattagcaagattcaccaaacctaccccagtccaaaaatactctattccaatcatttctaaaggtagggatttaatggcttgtgctcaaactggttctggtaagactggtggtttccttttcccagttttgtctgaatcctttaaaaatggaccaaatgagattcatcacaacgaaaactattaccaaaagaaggcatatccaaccgctgttattttagctccaactagagaattagctacccaaatctttgatgaagctaagaaattctgttacagatcttgggtgaaaccatgcgttgtctatggtggtgctccaattggtaaccaaatgagagaaatggaccgtggttgtgatcttttagttgccacaccaggtagattaagtgacttgattgaccgtggtaaggtttctttatctaatgttaaatatttagttcttgatgaagctgatagaatgttagatatgggtttcgaaatccaaattagaagaattgtggaaggttctgatatgccaccagttggtcaaagacaaactcttatgttttctgccactttcccaaccgatattcaacatctggcccgtgacttcttgggtgattacatcttcctatctgttggtaaagtcggttccacttcagaaaacattacccaaactattctttacgttgaaaatgaagacaagaaatctgctttgttagatttgttagcctcaagtgacgaaggcttaactttaatctttgttgagactaagagaatggctgatcaattaactgatttcttaattatgcaaaacttcagagctactgctattcacggtgatcgtacccagagtgaaagagaacgtgccttggctgcctttaaatcaggtcgtgctaatttattagtcgccaccgctgttgctgccagaggtttagatattccaaacgttacccatgttatcaactatgatttgccaaccgatattgatgactacgtccatagaattggtagaactggtcgtgctggtaacactggtcttgctactgctttcttcaacaaggataacaccaacgttgtgaagggtttaattgaacttttaactgaagctaatcaagaagttccagacttcttaagaactgctgctgccttttctagaagtggttccaatagatctaaatctggtttcagccgtaacaacagtaacagagattttagaaattccagtaacagctggggcaacagccgtaacaactcttcaagaggtggtaacagttggaatagcagctctagaagtagctcttttagaggtggtaatgatggctggggtaatgtttccagcaacactagtaactcatggtggtgaataattgaaatttacatttctatttttttttctcaactttaaattatttttaacttttgtagttgactatttgtttcttgtacttcatttattcctcacctttctaccattattattattattattttttttgatacttgctcccacagttaatgattacctgtttgccatgtctgttatgtgaatatattactatgcaagaagctcgaacaaagcttttcattttttctgttatttttattattactattatttttacttagaaaagtatcttcatttttgcctggaagattattttctaatgttgtattttactaacatttcaaatatatctcattttaaacataaatactataatagtatttcagcatgtatgatttttttatgtttaattatttgtcgaccatcgtagaaaagatagagttgatttaagtctgttttaccaatggaatgttttacatcgcttttattttgtagttaattttttaatattccgtttacctctgaacaattaagtctattttattaatctgcgcatttgtatagtagtatatcgttatttttttttttcgtagttcatcaattcaagatgattataaacattgtagatagactaatcattattgtataatttttttttaacttatataatgtaaactagatataaaatgaatttagtttttttattattaacgtttttactatatatgaacaagagattatacaaagaaatgagtgatatatacttcattcattgcttatttatatatacaaataacttggtaaaaaaatctttttctactggatccaatatataaatcaccatttataataccaatataagttgggtggaatagaatgcaaatgtgacacaattgtcattgggtcctccttaatataacgctggttcaatagatcatgtgaagtacgttcgatatacatttgcttcattctttgaagtggttctttttcctcaaaggacattggataggtagacgacactaagggtcttttctgactagaaaaataatttgatgattttttttgattcaaaaattcagaatatgattcaagaattttttctaatggttctcttatacaaacatcaataccttttggaacccaaatctcatatactccattatatttatatttaccagtgggacgtaataaaatataaccaatatccttaataacaatttcaatactaccttgaaaaggtggtaaaatatgtctaacaaacgcgtcctttctacaaagagttggtaaaatcccacaatatttagataaaggatgtggagaacttgattcactggacaaacaagtttgaaatacttctaacgctttatcaatatttttgaatacctttggttcacctggaatatattttgttatcttattaatagtgtttggtggtgcctttaaataaaaaataccaccaacagtatatacagatccgttttcagttccactaaaagaagaataaggtttattcttaactcttttatagttagttaactctgtcttcctaatcctttgcaaccaagacttatttattaatatctccaaattttgatcacattccggagaatcactattatcactatgaagtaaagtcgaataacctggcatatcataaataattttattgttaatttgataaggctgtactgcttgggtcatattaggtacatatgaaacaccagctcgttgtgatcggagaaatgaattgatattatggtcaactatggtatcaacgtttttaggttttgttagttttcccttttgatcataatgcattttaaaaccaaaataatcttttaagagcgaattgattagagtagatttcccaacattagcatttccaaccaaatatgattctttacccaacatggataataagttagcgatattccattttttcaccgttgagattccaacaatagaaattgagttcttaatatctaagtttgtcttgaagaaatactgaaaaaattttggtagtacagtagggagtaagaattttttcgatataatttgatcactttttgttaacactaaagttggattataatttttatccagcaataatttcttatctatgtggaaaggaaattcattcaacggtgacatcaaaactaatctactatgtctcggtatcttttgtaatatacttgaaagagaaacacctttaaaatcatttatatcatatttattttgatataaaaggtcactgcaacgtttgcagatcaatggggaatttaaaggattacgtacatctgcagctgtagtaatggaattttcaattgtgtctattccttgattatgcaactcatgaaaattttgtatatcttgactaaataacaagtattttatatcttgaattgaatcacgttttatcttatcctttggaataagataatatcctctcttatcagcatttgtattttgtaattccacaccacatgaattacaattaatatatctacaaataggtgaattccaacaaaccactcgttgtttgtaaatccatgctaatcttaacaaagaacacattgctaaattaatgatgaaacgaaacagggtagcatagaccaaatattgaaaacataaaaaaacagcaacaaatgtacctatgctttctcttctatttagttacttctatgtgataaacattctaccgacctctaatgtaactctttatatcatgtatcatcaatgattccctgggcagttaatctttatgtttaagcacagatatcctttctctttatttttttagacatacaaatctttttggctacctttcctttattttgtttattttcttaaaaccagtcctcttttcatcgtcttgaacgatccacaaatttttggttattttaaaaattgaaaaaaaaaaatttttttcctgcgatgagattgaaataattttaactaagtaaagatatttagaagtaagtgaattaacatccatctaagaccaactattttatatactatattatatatatatattaggtcaagttttttttatgtatatgctttgatactattgttaaccaattatcaattagatttatagcaaaagtaacagtggctatcaagttaagaagttaaaacaatatggggaaagtatcgaaagccactaagaaatttcaatcgaaacatctaaaacgtaccttggaacacagaaaggaacaaaagaaacaaaagaagaagatccaaggtcgccgtggtaataaaacagaagaagagaaaagagatgcggctttgactagagaagaacaaaaattaaaaaagtctgctaaagaggaagtctttaaagatctttctgttgaagaatttttcgataaaggcatcgaattaccaaaggaaaataaaaaatttacaaagcataaaaagaataaatctaaatctgaaagcgatacaacctctgattctgattcctcttatgacaatgatcaagatatggcctccaacattgctgccttatcaaaagaagatcctgaattttttaaatatttacaagaaaatgataaagacttattagatttagctgcaagcaacccattagatgctattgaagacagttctgatgatgaaaatagtgaaaataattctgatgttgaaacttcttcagaaaagatcaatttgactgtaaaactagttagagaatggaaacaccaattacgtgaagaaccatccttaaaactttttagaaatattattactgcttttaaagttgcagtcaacattaacaacttggaaactattgaagaatataaatatgttattactgaagaaaaggccttccatgagttgatgttcgttgctttgaagagtctgccacaagctgttcaaaagatgattccatataaggaaaataaaggtgctagaactttaccatccggaacaaatgtttctaagatttcctctattattaaagcacatgctccatcattactgaccttactaaacgatattaataacactgaaactgctgcactagttttacattctgttgatcaattaatgccatatttattatcgtatagaagaattttaaaagaagttattaaatcaattgttgaaatatgggctacaacaagagatattcaaactcaaattgcaacttttgcatttttacacaatgctgctaaagaatttaaaaagtccctattagaactaattttaaagactacatattctacttttattaaaagttgtcgtaagactaatattcgtactatgccattaattaacttccaaaaaaattcggcctctgaattatttggcattgacgaaactttaagttatcaaataggttttgaaaatattagacagttagcaatccatttaagaaacactttaacaaccacatccaagaaatctagtaaagttaattctgcagaagcatacaaaatcgtctacaattggcaattttgtcattccttagatttttggtctcgtgttctatccttctcatgtaatccagaaaaagaacaaggccatgagtctcctctaagacagttgatttacccattaatccaggttaccattggtactgctagattaatcccaactccacaattctttccattaagattttatctggtaagatcattaattagattatctcaaaatacaggtgtttttattccaattttcccaattatttcagaaattttaatatctactgcattcactaaaccatctaaaaaaaataataatttagaagcatttgattttgatcataatattaaatgtactcaagcttatctagggacgaaggtttatcaagaaggtttagctgaacaattaatcgatcttttagctgaatattttgtcttatattcaaagagtgtttcattccctgaactagtgtccccaatagttatctctttacgtcgttatatcaagacttccaataatatcaaattaaataaacaattatccaatattattgaaaagttgaataaaaatgccaaatatattgaagagaaaagatcagatgttgattttagcccaagtaataagacagaagttaataaattcttaaataatattccatgggaaaagactcctttaggtgcttatgttgttgtgcaacgtgaggttaaagaagaaaaagctagactaatgagagaaagtttagaggaaaacgatagagaaaacgaagaagttgaatctgctaagctaacggaagaagaagatattgtaatgcctgataattaaaagattttactcaatgttatgataaggatttagtcttacttaatacaatagagttatctaactatatatacgaaataacttattatctaaatacatataaattttgtaccataatttcgaatactcattcatttattatttcaatccatattttatgtaatttgtgtttacagacattattattactttaaataaacaatatccaatttgttgattcgatgcataaacggtttattatcgtacatgaatagttttaacctacacaatatttgtaaaaaaatatttatttattaggttttatattatctactttttttccttgtattattttttcaatgtttttacaagttacaccaagaaaattaatgattgtgcaactattcttcaaaaatgttttccagtcttaatcttggagcaatattcatagataacagttcttggaacaataatttagcagcatatggtatggtcatcttcattacattttctgcactcttacatgtagtacaccaaccactataacccattaaaccacacttattgcaaacatcaacttcaaatgcgtcagaactaatcatcaatctttctaacaataattgagaggcaccataagcaataacacaatctctttccatttcacccaatcttaaaccaccatctcttgatctaccttctgttggttgacgagttaacactgctcttggacctcttgctcttgcatgcatcttatctaaaaccatatgcttcaatttttgataataaataggaccaaagaaaatatatgcctgtaaacattccccagtaataccagaatataacatatctttaccagaataattaaacccttgctcaataaggatcttagacatgtctgcaagtttagaacctccaaaacatgtaccgtattctaatgtaccattcaaaacaccggctttaccagataccagttcaatcatctttccaactgtcatacgagatgggaaaccatgaggattcataatgatatctgggcatataccttgatcattgaaaggcatatcttcttgttttacaataataccacaaacacctttttgaccatgtctggatgagaatttgtcacctaattctggtcttctattttgtctcaacaacactttaatcaaagcttgatcattatcagaaacagacatcataacttgatcgatatgagatggttctggtgctctataaataattggagtttctctatattgtgtatctgaggaacctgaaaatggttctgaagagtttgttggtacagacttgttgatataaatttgaccgctatcaatcttcatacctacttcacctaaaccatcagggcctaaagcttggtgttgccatattggttttccattttcatcaactctcataccaccaataatatcttgtgtatgatttggatatcttttcaacacagttgtcgtctttctacgagtttcacaacggccaaaacctctatcaattgatgccttatttaaaactaaagcatcttcgatatcataaccagaatatgacataacggcaactgttgcattttgtccagcaggtaacttatcatagttaattagttcaatagttttacttttcaccattggttgttgtggataaatcattaaatataacaatgtatcaattcttttaaactgattatatgctatagcaccaatagcctgcttacccatcgcacattgatatgtgttacgaggagattgattgtggtgtgggtaaggaatcaaaccggcaacagcacctaagatagtgaatggctcaatttctaagtgggtgatagctggctgtatatccttttcatatagagctatgaaggaatcattttcttcatttacatcaagatattcaacacaacctaatcttaagaaatcatcaaagtttaattcaccattctttaattttcttaaatgatcagctgtcacttgggatttaccatcagttacaatgattaatggtctacaaattctaccaccatcagtggcaatatgaacagccttttgatcagcatgagtgtagacagaaataaatgcagatattttaccggttcttctcaaatttctgaattgataaacaaattttgtggggaatctagttgtaccaattaaggtaccattcaagtaaacaccgtaatgtaaatgtaaagatgcactatctattaaagtaatatcttctacacctaagacgtaacaaagtttttttatcggctcttcttcatcatctgttgtaatgtgcgtcattaaagccaaatttttcaccaaaccacaggcttcaccttctggtgtatctgctgtacaaagcataccaaactgagaaggctgcaaagctcttggaccagaaacttttctggatttttcgaattgagaagaaattcttgtcatcatacctaaagctgaaatatacgacaatctggataaaacgtgagtgacacctgctctttccatcttgaatctctttaaggaccaattacctgtggagatagctctatttagcccacttgtgatgttattggagtgaacattaatagataacagggcatcatattccatagctctatttggttttttcaatactttatcaatacttgctttaaaatctgtgttaaatttcttaaataaatcttcaaatagtaatgaaatcagttgaccagccaattccaaacgcttattaccgacataatctctatcatccaccattttagggttgtgaatggccataacaactctacgtgtcatcattaccatatacaaggccttctccctaaaatctaatgcctccacagtcaaatgtgccacaactgtagtagcaatagcttctataccttcctgtaatacagtcaatttttgtcttctaatagttttcactttagtaccaatatattctaaagcttgctgttgggtataaatattatatttagaagcttcttcgaaattaatagcaaaaatatcttgataactactatcgttaccacagaccaattgcataatttctaagtcagaaacaacaccacacgcctttaagacaatgacaattggaagttcttcagagatagagttgtgtttcaaataaatttttccattcttagtcaccacataagtctttgactttctttcatgtgtagaagaagtgactgaggcttgaacaattcccttcttctcatctgcctccacaataatacggttctttgacaactgttcttgaactaagataactttttcagtaccattgacaataaaataaccacctggatccaatggacattcatttaatttagccattgtacgttcatcagcaccattaagaatacatttatttgatcttaacataattggcatcttaccaatctctacatctttgtgcatgataatgtttctgcccctagtatattctatatcaacatagataggggctgaataggtcatatctcttaatctacactcatgaggaggagtcaaataatctctagtggaagaagttgacctcttcccgactctaatatctacatatttcaaatagaattcaggatcaacatcagagagaatcagttcattagctttaataatttttttaaggtccacatctacgaaataattgaatgaatctaaatgttgtttcactaaacctttaacctttaaaaatgcaggtaatagattccatttatcctctgcagtgttgatttcgtcggttaatttctttcccttatagactggcttcaataattcatcaaatgtttcatccttttccataccagaatgagaatgagttctttttctattatttgaaaccaccatattccttttttattctctttatcttgatgatttcattcaaaaacaacctcaaacagtacagagagggacccaaatgtttgcactctcttagatcgatatatgtcaacctatggcaataacgttactatagtgtattatacaggagaagaaaaagaaaaagctatatatacaagtatcgagttctaataatacatgtatataaatgcgtacctacaaagagatattaaatctataaatcaaatcgcttactcatcacatctcctattgaaaatttttcacaatatcaaaatcccacgaaaccaaaaatattaaagaaaaaaaaagactaatataacatagagaaaaaagggtaatgcattctttttttctttttttttctcactatggtattttttttttcagtttatttcgtattgcgaaaaagtaaaaaaaacatattttatttaggcaatagcttcaaattgaagatagaaataacaaatgagactaatccaatcaattatatacagtaagctgccttatatgaattgcacgaacagagtaaattttattttattttattcagacatattttttatatcttccactacttcaccgaaagcttgctgaaaactatatagattgagaatcgacaaatccttgcaaatctttcttaccacataatcttttgatatttttggatcttttgtaaatatttctattaatttattatccaatttcaacaaaaaaatatctgaataatatggtgtagccaagatcattatattgaaatattttttttagtttcctttataaatctcttaattttcatagctgtcattatcattatcagaaaagcctacagtaaaatctgttacaatgatataataattctagtatagtctgctatttattcgaataatctgtctatcattaatagctttgtttcttaacaagaagaaatgaggtacttttttttccactaaataatccaagaatctgtttttctgtcattattacattcggtaaagtaatactttgatcactagagctacaaacaagagaatgcaagaacttaactataagatcaaatcaataaagataccctagatttttttccttttgcctgttagcttagctcctaatcacgtgattaaaccctaaatttcgtatattggagataaaattgatactatatatatgtatatcagaagtaagacattcaaatacataccctgagttaggtggtttctgttaagacttctaaatagacagtatcatcaaaaagaaacagtatataaagaggatgattttgctatattaaattcatcaaatatcatataccattaatatggagtattattttagactaaatatgtggcttattacagctagacttaaaatctttttatatctattgaactgtatccatatcaaagatcagaatcagagaataagggaaaaaaaataaggagagacaacaagtatagttatctatgaattgtacagataaagtaaaaaaaaaaaaaaaacaaaggaacactgtcaagggtatatataactaccagatctctaaaaagattgttgcttataacttaagaaaagttaaacttttcataatttcttttattgtctttaattttttttcccagaaaaagatagatctttaaatgatctttacatattcttgtattttcaatctcaagttttacaatatcttagatttgttgtaattatagaagcagaaaattgacataaaagaacaaagaatgtagaaaataatatattcaccacatacatacacatatacacatatatatgtactatacagatatgtacattatttaagcttttaagagtcaatgaactacattaaaacagaaaccaaaaaaaagaataaaaaataaaagaataacaattgttataacccattatcaagacatttgttttgatagaaatctacacatttatttttcctctcctaagtgtctctttgacccacaactgtacacaaaagtatgtatacgtgtatacctctgtgtgtggtataatcaatagcaggaaatcacacggtatatttctatcaatctatatgcacacacattgtctatttatttatcgctttaaaaaagcaacagaaaataacacggagtttgtgtggtgcacagatctcttctccgtgtaatttcctagataggaaaatgtttgaagagaaggccgtttaaatctatttttagaaaacgtagcaatctcgaacagcgaaaactaaaaaaaaaaaacaaaaaaaacagaaaaaacggagcaaaaaaagagaaagaaagaaaacacgttatatttacactaataaaatcttcaaatataatatccataaataatattgatgttatttcttggtgttgttgacatttgaatcaaattgattcaccctcccccccttctctacttttattaaagaatggtggctgtgtgtttaatgtatgtctcaagttatatttgtctacttgtttaaactttaatttttgaaatacggaagctcgaaaaatagaaaaaagagaaaacaatagaatgttatctctttcttcctctcctttaaatttttgttcaatgccaaggattctttttttgtttttatttttttttcttttttgttttattgaaatggcctattatttctcttatgagtccccacgtcttgctataaagagatttcctcctgatattatttttgatttatttataaaataaatgctatgcacttcatactactagggagtattcttgattaagttatatatatataaatgtatgcttatatatgcttgtatactttttttttgtatatctgttgcactagtcacctaaatgtatatccaatcgtgtaagagaaccaataagaatataatatactataacgcaaatatccattttataaaagaaaatatgtctaatacgattgtcacatcattaaattcagttgatataatagaaaatagtgaaaaattaggtgtgaacttaccagttgatgtgtttcccaataaaaaactgacaacagatcatcaaagtatctttctatttgatttaataaataatgatcaacctttaccctcaaatctgttgaataatcataacaaaaatattggtgataacatatatccttattcattccaaatattccatctggataacttaaatacattggataatataaaagatctaaccttccaagatattataaaaataactacgccaaataataatacaggttcaataaacgacctatttgataatttaaagaaaatatccaaatatgtattctacgatggaattagtactttaaacagttgtcaaatatcaactttctggctaatactgaaattctttcagtttatgaaagagaatgttggcaacacattgcaaattatgttgtatgaatcaaatcaataccaaataaataatactaaaacctttaattccgttccaacaatactaccaagtaaaaaaccgacccaaaaaatgcctaaaaaaagacaatttaatttatctttgaaattacctgtaagtacaaaaaaacacactgatttattcattgattctttgaaagaagatctaattcaatattcaccaacctcactattaaaacattttcatatcaaatcattagattctctatacaataacgataatcacatctcaaatgatatactaaatatgttccctacttggctgaaaaagattatagacacaaacgatgaaaaaattattttgtcttcattatggactaaatttaatatcttagaacatttagagcacatgaggttaaaatcctgtttaatcaataacactgaaacttcctctcaaaatgagaatttgtgcacaataccccctctactcaacaacaaatcattacaatttaaaggacaacatataaacatctattccttatcccttttacaaaaacaattcaaaagacaaaagactttcgagcacaaatttaaggaacttagtgtgacaatcccacaaaactcattaaatactatttttaatggtaataataacgatacaacaccgctatccacttgttctacagattctgatatcttacctactccattaaataattataaaattgataaaggaattcaacaatttgaaaaaaacagatattctaataatttaccgtatgaacattcaatagtcaaattaaataattcaaatgactattttaatgcaaattttattaaatttcctcaaataaacaataactttcattatattgctacacaagcaccattgccaaatacaatcaatgatttctgggatatgatttggaatgaaaagattaaagtaatcatatctttaaattctaatgaagaattgaaattgaaaaaatgggatatatattggggtgaaagtctaaataccaacgcaaaattaaatgttcaactaattgatcaatgggataatttatgtggaataaatgggatcatattacggcaattccatttaacaaggtcagatcctctaaataatattattgggaaacatatagtttatcaattgcaatatacaaattggtcagattcatgcactattaatattaaagatattttaagtatttataagatacgcactttattaacctatgatgataccaggttccttgcactgttgaaatctcataaaaacattcggtttgatattccttctttcagcgtcagtgaaaccgatttaaaaaaacatcggaacactccattgttagttcattgttctgcgggttgtggtcgtactggtgtatacatcacattagattatgttttatgtctgtttagaaacgaacttaaaaagaaaaataaaattaatgtgtggaatatggaagatgatctattgtttataattgtcaatgaactaagaaaacaaagaaaatcaatggtacaaaacttaaaccaatatatagcatgctatgatgaaatgatccaatattttttatcatatcagtaacgtgataatgttattattcaagggaatatatttaattatatatacatttgtcaataccttgtattaacattaataatatctatattacaatctgagcgtacatatatttcaatttttcttttcctttttccttcttatttaatgttccttgacacacccttataactttttttaaatactaatatagaatcaatcttttctagagccaattccaatagttccttcctcttttgtagctcaatatgttttgatatttttggatcttccttagcaaataactcaatttgttcattgctcaactgacttaatcgtctgtccaactcaattggaaaattgtagaaaaaatcacttaacagttccacatttaaaaataatactgctgttgatgttaatttctcattaacagcattaagaaatatttctgggcatctatctttttcagaccttgaacgacatttattttttaacatattcaatctgaactgaagtacttttgatctcttatctaagaacaatgcttctttaccacgttctagtagcattttagatatacccagagtttctggccttgatgaatcctcttccaaatacgacataaccctctttaatttcttatttccaatatgattttgaataagattaaaacattccttacattgtctcaattcctcctttatcagtctcacagagtgatcttttgccatactccaatcacgatcctccaagtcaatttcatacttgaagggtttaatacaattttcaacttgatctgcagtagaataaaatttagagtttaacacatttacagcagtattattaactaagtctttaatcaaatcatgattcttcaattgcgttttgtttaaaatattatctagttcttgtaagatggcattagtaaccagattagtagaaagtctaccaataccaattttagtaagacttgaggaagctaattctaattttctatgccaatataccatctcatcgttactctttatcttcgaagaaagctcatagagattatcatccttccaatacctatttgccagaaaatccaatactttttgatccagttctgctttcagtatagattttaatttatatctatcgaatttctcttgaaattcttttattgttaattttaatatatcaatattatttaacaaataggactttggtgttaattgcctatcattgaattcaactttaaacaaatatgatgcatcatctaactcttgttgaataatagttgatgtaggctctagagcattagacattgaaatctccaaaattttaatcaatttctctcttaaagttttagttgatacttggcaattattaaagtattttttattttctttaaaatacatcctttcaaactgacgtgattccatttgttgtaaaccaacctgattcaccttatatttttcatgcagtttattattagacttcttaccaaaaatgccacccagagaggatgaggaatcagggctcatgctttcaccaaataagctgtaatgcggtctacttggtgatttagtaataacaccaacatagcccatttttaacgggtatttcttattatttaaaatatcttttgctatttcgggggaaacaagatctaacttggtaataacaccaatggttcttgacccattaggatccacagtctttgacgctctcaatgcggaactattggctaaatcgacatcagcagaagaaatcgcaagtataatgttaggttctgctaaatacttctcacacaattgacggattttacttttcaattcagttggttgatctgcagcttctatttggatatatcccggtagatcaactaaagaaaggtccggtacattagatgacttgatagttaatcgaattggttcttctgagacagcttgtgaagatgggactgacatgtttagttccattaaaatacgtttaacctccttaaaatcttttaaattgaataatctctgttctggaaaatctgcagtaatttccgatgaattagggatgttaaccaaagtcaattcaataggcctacgtgtaaccatattagagcctttaggcaaaaattctttaccaacgatagcttccaagacggaggatttccctgaggattgtgaaccgatgactacaatcgaaggtaatgttagatgtgaagacgttgagtcgattttacttaatattgatctaatttcaatcatttgtttggttaaattcaacatgtcatcttgtgttgtatctgctaaatcttcatcagaatcatcagaatcagccccatctaaagctgcttcttcaagaagtttcctttctcgttgttcagcttctagttcatttctttcctcatctgttaaggcagcaagtaaagtagcagaaggtattccatcacctccactgccactgtcactatttgatcctgaccccccattataggattcatctttagagaaaatattctgaaacttatccttcattgaatcagaaaagtcttttaattgagctaatttatccatagtaaaatttgtagtttcttcaaatttatacgcaatatatgatcctgctgctgccataccaccacccatatataccggaactctaactatcttactaataattttggggaaaattgaaataaatcttttagttgtgataatttgaagattcctgctatataaatttttcatgtttcttgatgtaagatggaaatactggatcatctgaaaggattttagtgggaatacaaaagaatgatatctggatgttgttgttcttaataaaacacttctagttgatgtattaattggtgacgatccacctagtataggcctcattgtaacaaagcctctgagttgtattaccatatctacttttatatgtgggttggccattactgtaaccctatttatagaataatcctatggtagtctattgttaatgaagtgtaattatatcttagttgttattttttttatctttagcttatttgtggtaggttcctaactacttttcctttcgtcttctttaaatgatcatagttgatgtctttataatcgattttccaactcaagagttattatttatttgctttgttgttgtttctttcgatagaagagaataaactcaaattctcaaacgagatacactatactaattaggaataaatatcaaaatagggaaaaagaagaatattttatgtttttttttttaacaaaaaaagatgatttgattaatttccgtttttggtaagagatatctgaaacgttttgctcttttcttcttttttgtagccaaaattttttaataaaaaagatactataaagaatacaaagggctaggaatcattaaatgactagtaaatatgttttcaaaaatatttaatctatgggatggaatgacaataattactgttatatcatattataattatttttatttagtctttatattaaaaaaagaaaaatgaataaaaacaattatataaagtaaatattatttccaatcatcgaacattaattttataagaagaatgaaagaaaaaagaaaaaaaaacacctttttaaatagaaatgcaaatatttgctcaaaaaaacatgtaccactaatgactacaataatattatattgttaaaacttttgttatgggtgtaccataactctgatatacattttaataaatatataagaataccagaacaactaacatctagagagctaatctaataaagaagtactgtaacccaaatataatattattaaaatgatattatcttttctatttttttagttcatgtgctcgaagtatgattaataaatctgctttattcatattacacaactattcaaatcacatatggttgatgtaacatactgaaactttccgtctctggatgtagatatacatattataaataaattaaagagccattattttatatatagctcttttgccatggcataatacattgtttttttggaggtgacaccaacttttttgaggtttctacattttttttttaaaaaaatatattacgatataaaacatacagaatataatgacatttttttaaaaagaaaattaaataaataatcaaatatcaatagatatttctaaattattcatatgactttggtatggataccattattttctactattatcaatttttatttaccctcattcttttttctttattactgtaacttcatacctttttaataaaataatcacttttttagtttattttaaataagattttatcattagatactaatttttttgtaaaactaataccaacatcaactttcaaaaaaaaacattcaaaaattatcgaaacagtaggcaataagagtaaattgctttaacgttcttaaaagaagttcatttagttattcaatcgtttattttttggttacgttgaactttaaaatcatgcaaactgcaggattggacttctctaaaaatcaatatacacctataatccaagatatatcatcaatagaggaagatattcaacaaaaaataaattttgcacgacaagaaaccaaaaatttatatatccaaattgataaaataaagaaaaaaacacaagatgcagatttatttgagatgacaagaaaagttccaccattgaataaaaaattaattaatctgaaaccaattgtcaatttaaaaggacataataataaaattgcagattttcaatggagtaaaaattcaaaaaatattttaagtgccagccaggatggatttatgctggtttgggacgttgcaaccggtttgaaacaacatgctattccgttagattctcaatgggttctgtcgtgtgcaatatcgccctcaggaaatcttgtagcaagtgctggtctaaataataattgtactatatataaaatttcaaaggaaaacagagttcaacagaatattatatctatcttcaagggacatactggttatgtctccagtatcgattttttaggtgaaacccagatactcagtgcaagcggggacatgacatgcgcattgtgggacattccaaaagctaaaagagtaagagagtacacggatcatttaggtgatgttcttgctttatctttacctaataatatagagcaaaataatatatttgctagttgtggttctgatggttatctatatatatgggatacaagaatgcaagcaaatgttcaaaacttctttgtaagcgatagtgatgtcagtactgtcaagtttttccatggtgataatactattcttacagggagtgacgatggtactattagtatgtttgatctaagatcggattgctctttagctaactataccttatctgtaggattggaacatcaaagaggtgtaaatcccactataaccacaaacactactaccactactactaccaccaccactatcacagatacatataataacttaaaacattattaccctccctcgactatgcagtataatagtactactccaaaatcacctactatttctgcaatatcttctagttatttagataatcaaggtgttgtttccattgactttagtaagtctggtagattaatgtacgcttgttatacagatttgggttgtgttgtttgggatatattgaacacagaagtagttgggaaactcgaaggacatacaaatagagtaactggtgtaaaaaccagcccagatggattagctgtctgtactgggtcatgggatactataatgaaaatatggacaccttcgtattcatgatcagaaaaatcacatcactaacattatgattcaagataaatataaatagtaattaaaaggcaataactctaaatatatatgattaatgaatattccatttttgtatatacccaagaccatttaaattgctgtttttccgaaaacaatcgaatgcttgtagaaataatataaaaaatagctttcagtatcgtatgctgctgaaccattttaaaaaaagataaaacataactttttaaagaatatatatatacataattcaaactcacagggggaaattttaatctttactttactttttattaataattgaacaatttttgaaatattaatatattgtcttaacttatatacatatttcttcgttttgatgatattgttttcatgaaaccattgacaatgtcaaaatattccattttttgattaaatcaatccttccagctgattttccatcaattcatctttctcagcaagagactcaccttcgtgtaattttaactctttatttttcttctttacagtattagtatattctaccaatttttccaacaactcatttggaaattgtccaaaatacagatataccttttcagttcgatcatgtctatcgatttcagctttgacggatgggtcattaagaataatctgcgtgaattctgtaatcatatcttcgtcaaatgtagggaggacttttccccaacttaacctaggtctattactttttgtcaaaccctccataggattctcaggtagggtaaagtttttctgtaaaacagctctcagtttaccaatattcagaggaacctgaactgagtagtcaactgcataagcattgtcctgaaacaataaatcatgataaatggtaaattttccagattttgcaataagtttacatatgatctttatactgaattctccccatccttcttcaataatagtaaacggcggttcagtatatttttgtactggattttcaaatgtcttgtgtaaatgataaatacaatgtgcaataatatctgcagggacttcttcaccatctttatttaacatgcaaatagtaatcatccattttcttaatggaagttcattctcgtcctcactctcctcaactacaatttgctgagttttcactcttatgacaatctcaagtcccatggtgttaataaacatgcaatacaattcatgggtttctataattttacaacacaatggtatgcaatagttcgaatcttattcatgttcttctccttctgtatttaaagagcaaaattcaagagtgaatacatattacacaaacaatatatagcgttctatattttttttctctttttcttgatcttcttattaatttcttaattttccttcattatttttaactaggttaaaaagatttgataaaattgtgaagaaaaaaagatatatagagtatcaattatatatacatatatttgaatatatatgtttgtatttataaaactgtataaaaatatctctatttttctttttcttaaataatttctttctctttctctttttcactatctttatctttcgaatcctttgagtccttatcatctttcttttctgcgtgtgttttaacataatcccacaaaagttgtagtaaagattcaggtaaactaaagagatccattgtaaactccccttcttcagtattattagtaaaattcattcctggtgctgtattactggttactatatggacgatttctactaaatcatcatccttcaattttgtcataccaaacgcaagtctttcaatgtcaatggaacccttaatcattggctgacttgaaggtttgctctttttcgtcttaggttcactggatccattggcagcagaaaccttgctattagaaacacttgcatttgttgttgttgctgtagttccagacgatgatgtagaagatgatgacattgatgaggcctttcttttattactcataagcgattcttctgagggtactaagccacttttggccaattctttcattaattttggtttatttatattaattggtgccgaaattatatggtctacttcatattcctctttaagaaagttcaaatcatgtgtaatctttctttcaccacctttatccaacaaaaaaagactgatatttaatgcaaatccaccccatccttgctccacaattttaaatggtggttctgtaaactttctatttgggtttgcaaaagttggatgtaagtgatacactactctgtcaacgatggataatggaatttcattattatctttatctaataaaacaatttcaatcgaccattctctcatagggaatccttccaccggatccaaatctggtaaaatatgctgtgttgttttaactcgtaccgtcctctttacagtctaaaaataatcataaaaaataagtaaatagacaaataaataaataagtaaaatcatcgatctataagcttaatagaaatccttattattaaaatcactatacctattaacctataaatcaaataacatcaaaatttctgttagtattaaagtatatatttaatatacatatttccctgttactcctactaattgttacatactgctaccattagtgtaattataaaataagtttacctgtatatcgaagtttgatttacaaatctattagtaatgttttttacacatttttccccctattaaatagtcagaaggtactaatggaagccagacagtgaaagagtattacaatactgaaacttgtatctaatactttttcttttcttgttcttgtagatttcaatattgctttttattgcagactaactttgaacaattttcaaaagaaagcaaaaggaaaagatgaaaaataccgttcaagatgaccttgtggtgttgactaaacaaaacaatgaatcaattaattaattaatgaataaattaactagtcaatctctgctctaaaagagccgggtttgcatatataagtatgtatacacagatagatatgagagatatagatgtataggagtaaggtaggacatggagcataagaaagtctgaaatattaaaaattacgatatttgattaatatactattgtagataatagtttgatatttacaagtatttaagagagcgaataagataaatactatatttatatgttcatttggtcttattagacatttctttgaattgttccacaatgttactctttaccatatttggagatgcattccactctaatggtaacactttccaatcaattctgttaaagatatctttcaattgaatgttagaatcttcttttttcaaagattctaacaaattcttaactttcgagtgtaactcatctttagatattacaggaagtaacttttgatactccttgataatttctaactctttttgctcctttttaactaaatcatctcttttatttgatgtatattccacaattgactcctttctttgattgatcatcttttcatatgttgtatatatctcaaaagtatcgatagtatgagtcttgctatcaataatcttatttttcaaggctgccatcatatttcttatagtattctttttaatctcatctttattcacaagagcagcttttaaatccttctttaaagtagtaagaactccattgtatgcttcattactggatgtgctgctaaatcgaattaatatagatttgtttgtaggatttaatagagttcttcttagcatcttattttctttttttttcttttcttcttcttaactgctccagccaataaatataagaatatatatgtatatttgtgtatatatattcattacacaaccttttaaaacagtataaacaatattatacgaaagagtgatccttataagtgttgtatcactatgtctatcctcaagatcactcttttttttttactttttttccctttgatttattcttctgtgtatgccttgttgatttttttttatttttgtttgaatatatatgtgatacatacatacatacatacacatgcatatacatctctctctatctatctatataaaatagtatcgtttaatctctagatatgtatgtttgatatttaataatttacaactcactttccttttccaagaattctgtccataaagatacaaaactttgtgttttagagacagagccatttcttttttgagatttattaaggttattcattaatcctgcttgttgtttcttatcatcatcccaatttaaaaaattagataacaattgtaaaacttcaaatttcttagggtctgctcttggaatagacacaaatgaaattaataaattagatattaattctttatcaactgtctctgattcactagactgttttaacattcctaatgcttttcttaaatgttcattcaatataatagcttcgtgtcttaatttgccaatctgtaaagcttgttctttactctccttttcgaatttatcctttaattctgctatttcttttgatttatctacctcatattgtaaatttttaatttgctgagaagatactttttcattctcaatactattatccaactgaatccgtaaggatttaatctgttgatccttttcctttatttcttctttaaatagattttcattattttgaatagtggtttctaattcatttagagtctcctttaattgaccttcacttttttgaagaatctccagattagattttaattcctccctttcatcttttaaatctcttgaatcttgtttattattctctacaattactgtcaattcttcaatctcatcgttcaactgatttatcttggattcatattcttttatctgataatcattcctgttgtcgtgatcttctagtttcgtttcatattcactaataatattttcatattcatcacatctattctggaggatctcataatcattctccaaagtagtcaattctttatttagcgtagttatagtatggactaattcttcattatctttggtcatagatgcaagtttatttttcatcttagtgttttgcgattcatattcagttaactgttcttgaacagtttctaactcgtgttgggattctttcatcttactaaagacatttttcattgcggatatcctacttaacaatgtgttatattgattttccaaagcatcacgttcattcttaactttttccaactctaatacgagatttgagtcttttgaattattattttgatctgtattcaattgtgattctggaacttcagtttcctctttattattcattatttcctctgagccttgttgctttgtatccacatcttttatatcattatcatccgtattatttttaattggtatatgttcttcttgcttttgttgctgtccttcttccttttcttctttctcatctccattttgaggagcatcctcaacattattcttttcatcaatattgtctatattagacgacacctttttgtctactaaagagacatcatttataccattgtcattatgtttcggattatcattttctgcagatatgttagttggaacatggctgtttttcttcttgtttcccttctttttatttttacccattctgctattagtaacttctcattaaaccttacaaccaaacactcttttttttttcccaatgattaaattataggtgagaaggcacattgaccagtagagaaggttgatattctgttatacgcatataacagacatacatacacatagtcagactcacttactcgctcacttaatatcttctacatgtgtcttcctccatttatcctgccatcttacatcaaaaatgaatgaaagaaatgtgaatttaaaagaaaagaaaaaaaaattaaaaaaaatcaaaaacccacaacgacatcaaaactttttctttttttaacttctcagttgaaaagagaataaaaacatacttctaatggaaaatcttgatttcattaaaggattagaaggtgatctcattgaaggaaatgtgataatcatatatgtaagctcatattatttgcaattacaagcagatagttaacactgtgctgtataatcatcttaagagaaactttgactctctctatatattttttgttttatttttttttctgttggagtaattgatacggattgtcgtattataactagaggaaaggtaacataccctattaatttgtgtgatgacaaaatggtagatatcactgacttctttggtaaggggaggaaatcaggttcaaagagtaccatatcaaacaccaaaaaacccgctagggcagctactgtacctgcaactacaactacaactactaaacatgatataatcgatctagatgatgatgatgatgaagatcttttagaattgcaatccaaaaagagaagattaaaagaaccagacactataatcatagattcaccttcaccaaagaggaaaaaaaataaagaagtttcagtgtctaaagatacatatgatcagcatgataaaaccactgaaacaaaagaaaatcagccttttgtttttaagccaatacctattgtccctataaagaatagagaacaatcaatcaattctataaaaaaagaaaatgtgtcctctaaagcaattagagtagacgaaaactttacagttcctgcaaatgtttccaaacataaactcaccgcggaagaggtgctagctaaaatcccatctcttgacctaaatagcgttcatgtcaaagaagatgctaaatttgattttagagcgcgtgggactcaagatgtggagggtactggagaaacaccgagcgattttcctgaaggttcaccaaattgcctgttaggtttaacgattgttttcaccggtgtattgcctacaattgaaagaggtgcagcagaaagtttagccaaaaaatatggtgcacgagtcacgaaatctatatctggcaagacatcagtagtagtattaggtgacgatgcagggcctagaaaagtggagaaaattagacaactaaagattaaggcaatagatgaagaaggttttaaacaactaatagcagggatgccagaagagggcggagccgggactgcagcagagaaggcaagacaaaaattgaaagaggaggaagaaaaaacaaaaagagaagtagaagctatgttaaaagaggaaaaattgaaaaaagccagaatcaaacaagcagaagcctctggtaaatccattaaacaagaagatatggttagagacgaagataaattatggactgttaaatatgcaccaactgatatatcacaaatatgtggtaataaaggtccgataacaaaattagtgaattggttgaaaaactgggattcaaataaaagaatggggttcaagagccctgggagagatggtacgggtatatacagaactgttatgctatctggtccaccagggattgggaagacgacagcggctcatttagtagctaaacagtttggctatgatgtgctcgaacaaaatgcatccgatgttcgttctaaatcattattaaatgaaggtgtaaaaaatgctttaggtaatatgtcagttgttgggtattttaaaaataaaagtaatactgatgatgtcaacggtaaaaaatttgttattatcatggatgaagttgatggtatgagtggtggtgatcgtggtggtgtaggtcaattagctcaattttgtcgtaagactaccacaccaatgattttaatatgtaacgaacgtaatttacctaaaatgagaccctttgatagaacatgtcttgacatccaattcagaagacctgatgcaaatagtattaaagctagattgatgactatctcaattagggaagggtttaaactggatccaacgattattgataaattggtacaaaccacaaggggcgatattagacaaatcatcaatttattgtctactatctcaatgaccacaaaatcaattggacatgataatattaaggaaatttcggaatcctgggaaaagaatgttgcactgaaaccgtttgatattacgcacaaattgctggacgggcatatctataccgatcttggatccaatacatttacattaaatgacaagattgggttatattttgatgatttggatttcacaccattgatgattcaagaaaactatattcattgtaaaccaggaaacttaccagtgaacaaatctccattagacatgattgcagaagcagcagacagcatatcagaaggtgatttagtagaaagaaggattcggagcagtgaacaattgtggagtttattgccactacatgctgtgctatcttctgtacgcccttcttcaaaagtagcaggacatatggcgggaaggatcaattttacaagttggttgggccaaaattccaggactaataaatattacaggttgttacaggaattgcaatatcataccagattgagcacttcaacagacaaggttggtctcagattaaattatttacccactttatatagtagattgttgcgtccactggtgaaagacggaagtgagggtatagcggaggtaatccaattaatggatgattactatttgaccaaggaagattgggatgttgtgatggactttatgattggtcctgacaagactgatttaataatcaaaaagatacctactgcagtgaaaagttccttcacaagaaagtataacagtatgacacatcctgtggtaatttataagacaggatccagtataggaggtgggggttcaagtagttcaagcggttctattaaccagcccgatttcgaagatgttgtggatgcagacacatccaacgctacgccagatgatgatgataacgaagatgatacggaattagacttaaagaaggacaagttaatcaaacaaaaagttaaaccaactaaaaagaaagctacttcaactaagaaaccagcaccaaagagacggaggactaaggcataaaaaacaaagttaacgatggtatagcgttttctatcagtatccattgaacgaacatttgatacatgtctgtttatagtcgaaatatatatatatatatatattacattgtatacgtgtggaaagtgttgccacaatatggaagttcctgaaaggaaatacacaagaataaaggattaagctttggccaattacaacatcataaagacaaggtaatacaatcacaatagctataagagaagaataatagagtctcaatgtccttctacaacaaacagaagtgaaagagggcggtagacattaagagaacctctatcaatagagttatatttgactggtggaatgtctgaaatggacttctctttcagggactctaatctattatttcaacacaaagaggacaacggaacacacacacacatacaagcaataaagccaagttaagtttatgaaccgtaatcgaaaagaggctttcaaaatgacgaggcttagcagaacgcagaagctaagagacaatggcattactattatatctcttcgctctattgcaacaattgtaagggacataacaacttgtaaaaatatatatatggatttttgagcaaaaacaaaaacaaaaaaacaaaaaaaaaaaaagaaaagaaaaaaaaaataatggtagctgttatgtattttccctacaaagagggggaactggggagggggaagagaaggaagaggaggtatagtttaattcaaactattacatgtccattctgtgctttgttgaacaagtgtaatatttggttggattgctcgacagtgggaagttaatatcaatagcagaagaggaggaagacttgtacttgtacattccgtcttattagacatagaaaacctgagttgtacagttcttagaattagtgataatgcgatttactaaataagaaaagggaatatgtttaaaaaagaagagagcaaggatgatcctttgctaagccaatatagtagcttgcaaaagaaagttgatacaaatttaaatccttgtcacatgatgagcttcttggtcatgtaattaataacgcagctttgttttatattgttacattgatgacgtacgatacaatgcaaggctgaaatggtgttagaaagctaaaaaccatcgtattgttatcctcatagttacctaattaattattttcagccttcatttgtttaggtacatttgcgatatcacgacacgtgcatatatagtctaaaaccagagacactacttcctaataacggagaaactactcaactacatcctagatcgtttcctcctctttctttttttccttctcttcttcctcttcctccgccttcttcatctcttgtaggctatcaatttacttataattaaataaaaacgacttatatcttcttatccataggaaaaggttcactaagaaataaaaaaaccaaaaaaaaaaaaaacaaaataaaataaaataaaaatatatattatttaaaagctgtggaaaaataaaggatttgaaatatttaatttatttcttttgaacccctcaattatcaaattagacatttcacgcacttaagagtgtaaagaacatatataattatcttatttttttgtataaggctttgacagaagttattaagaaatagaattgtctacttttttatttttaatattatccagatatatctacaaatattaaagaaagaaaaaaaatagtgaaaatcaaatattataatatatagcacaatgcaacaagatcaaacaaagactcaaattctaattactgatattccaaaggataagttcacacaaaaatggccaaagactattgagactttgttatttgaaacaaaatttcctgaattaaggtctaaattacagtatttcacaccgctaccctttttgcaaagaatagtgattatatttgatgattctacgtcggcttcaaagacgtatgattttttaaaagacgggaagtgcgttgataaaccaatgaagttgtttctaactgaatcattattaattggatctaatccaagagcacgttcttttgatgattccatgaatgataactttacatcttatgataaaactacgaatcccttttcacatataaatagtatcaaatccaatgctaacaaaaatattgataaagaatcacaggaaaattcaaaggagaaacctattctatctttggagacaaatccgctaaagactggggttactacaggatctttatctctagggtcgccatctctatcaccaaataatagtctgttggaatctccaaccttagtaaaatttagtaaagatgataaattacattattatagagaacccctaccaaagatgaattcaaactctaactctaaatatagtataaatgagactataaatatagtatccgcagctaacgcagatattgatggtgagcagttagatgataatgataaaacactatcttctataaacacaccaccaaagagccccaccataacgattaatccagtatttccttaatctaatcgcacgtatatatatttacacatacacacacatatgcaactaaatatgtatatatggttttatattgtatgtatgcattggggagaagaaaatatttaatcacgtatatataattaaataaaaaaaaatataaatgatagttttattttaattatttacatgtaatggaagaacatcgaagaaactttaaataaataaagagtaataaaatagagatgcggagctatatttgattatttgacattaatctatcataataatctcttttcctcctcttctcttccatccaatactttttctgttcttttcttttctttgtttttgttcctgattaagtttttgtttgttttggattattcatcatattatggtactcatttattgttgctaatgaagaatactcaaacgattcaagatcgcagtttcttcttactaaattgtaaattacatttcctggtcccattgatatagaaatgttttttttacctttaattctttctcttggtacaaaggaatttattgtatcatagcaatatgtgaactgcactgtatttgaactgcatctaacgaacctctcaattgcatgatgtacaagtaacgatatacggccatctaaatttccaactattggatacattaattcagtagtagtattttgatgatttagtttcagtatatcccaaatatagtcgtataaaggctcttggataggtcttagaacgttattattatggaatgcgatattatttggattggtcaattctgtgattctcaatgccgggaaccttgcttgagactcgattcgaagtctctccaaatcgtctacaagacctgtgacgacgcattgtttgatactgttgacgttagctattgcaatagttggggccatggatcttattgactgtaatagattgtgtacctgcaaaggtaaattggttgcccttggcgaagataaagcccacatttcgaattttgtagaatgattcattttatgtgctataagatatttttcagtggatttgaccattagttcatttctataatttgcaatattgaataagtctcttaatgtaaacagattgttcacgcataaacaggttaattcacctaacgaatgtcccaatagcaaataatcctgtgatcgtttctttatattatctcgttctaaaagttcatatagtttataatataggttggaacaaacagcaatactaccaggacttgaagggtttcgaaagatataattgattaagtcatttgtcttaggtccattattttctataattttattgaattccttttgtttatttctaatcaatgcttttaatacaggaatagaaatcgaggtaccttgtccaggaaatgtaattaacctcatcttttcttcatgtgattaattgtattttattattactattttatgtagatgtagatattagagcttcttatctatgactataagagcaaataaagcagtaaaaataagtaatgtaacaattttgaacgtgtcattataaaaaaaaaaataaaaagatcaaaaaaaaaaacgataaaacaccctttcatcctctccatctagagaggtaatctcaattgaatcatgttcatctttattattattgctgttattgttatgaatatgattattgcaaatgatcaaacgattcagttttccaatcttgacgataaaactctttgcacccagacatccgaatggccatataaattttcgctgtcatttccatgttgtctttcttttttttatgttttgttttttgtctttgaataaaaaaaaaaccaaaccgaattgttctccatagaatggtactaataaaataaggcataagaacatgcagaaattgcaccctttagacatgttattttgttttaaatatgtaaatacaaaatgcaaaaaaatgtaattgaattttcgaatcatgatggtatgatctttttgatagtattctttttattcaacagattacttcttctttaaaaaaacaaaaaaaaaaaattaagttgaaaaaaggatagtttttaggagaaattccttctagatttactataataaatgtcaaacataaaaaaagaattttttgaaaattgggtgaaaaaagttaaacaaaaaaaaaaggatgtatacagttgatccaaagcttgaaacaatgggctttgaagatggtatgatatatagtacttttgaatatatttaatcatatgaatcttcagcaaatgactttttgtcactgccttgttaattatttatttaaacataattatatatatacacttttgggtaaatttgtattttgttaaatttcctgtcacaatgaatactattgtaagttgattttcttcgttttggaattatctctaatacttgttctacttgtgaaaatctcacttttaaaagtatgtacttaatacattttaaaaatacttctttttcaacatgctgttactacttaataactattgaaaaagggtacataaaacacataattaaccacttttcttaaataattaaatcttaagttgtgttatttcttatatatatatattttgattcagaaggaatgagctacaatatgaaagattatctttcatattgttttttagtaacacaacggtatttgctaagaatatctttttatactcctttcatacgcgagcacaaaataataacaagggcatatagaacaaaagaaaaaaaaaagttacctagtaaatatatacaaagccacacaagaagaatgattcatataacatacgtaagtcggttcaggaatggtaggaaataactaataataaaaaactagatcagaccaaactagaagattcgacacaaaatcaacacaatacattgttgaatgaaattaagatagactactacctctttctccattatttaataaattatcattagtaacaatttttattggaagaaaaaagacaaaatgaaaagagtaaattgtggtatgtatgtcctaccagcccttgcatttaaagttgacgatatacataaaatacatcataagcttctaaaacacaaaagggcattaagatgaacataaaaaacaaaaattacacgcacaattcgcataacatttgaattccttgatctctccgatggacttgacgcttactagatctgtctacgatctaaaggtaagcaacacggttttatagtcctggatgaattaatccgcacgattaatgttacttttatttcttaagtgaaacaaagtcacaagaagtacgaaggatcactcttcaaaaggacatcttagtaaggtaatataactacactgcgcttttcctgcgacgtgaaaattatgctctttatatatattctggttcagaagggttaccctcttttttcataaatttttttgtctttttctttaattttctaagaaatctagaatttaggtttcgggaaaaaaaataatgggtttttttagacaattttgactaagaaagaacataggggttttataaagaaacagtaagtgggacagaatattgaacaaaagcagtacttgtccttcaaaactaatccttcaaaactaatggttggttagtaaatgtttaatattaaataactgatttaacaagatatagatgtaaaaaaaaagtgtacatgtatataaatataattatttgattattataattttatttgaaatttactcattaggttaataatgtcaagtgaacccctgttaccggtaagtcagaacacaaatcaaactggtactaaacagattaaggttatattttcagatgatacaatacccacattagtgatttctcatataccgtctgatatagattataaatggttgagacgtaatattagatcattgagatcacaacaatgtggcgataaatctttaaaatttttgaaaaatggggtatatatcaacgaatcacgatttaaatcaagtttatcgaaatattttaatacaaatggccctaacaataatccatttttcattcattgtatggttggtattgaatcattatcaccttcagagttaattaatgatgatttaagggatgatacattgggtggaacaaaccagaataatgatagttctgaacctatgggtgttattgggtttgatagattgcgtggactaggtttttcagatgaagagattaatttattaagacaacaattccatgctgcatatatggatgatgaaaattctggtggtaataatggaaatggaaatgaaaatggagataatttaaatccaaacactgatatggacagagttagagaactggaagagagatggatggaaaatgatgttagagatgatggcgcagatgaacaatttaactctatacccataggaaatttcaaacataacattgatttgctgattggtataacgatcggtttcacactaggcatatttagtttaatattaatacggcaagatgggttatttaacagaagacaattaatggcaatatatgcaggtgttatgataaatattgtggtatgttttactagagtatgataagcattgatatatatatatatatatatatgtacgtatttatgtgtgtatgtatgtatatttgtatcttctttaacgacggattaataagtatgcattttcttgttttaaggtatttaagtttctgtagttaccttccaatctcatcaaaagaccaccaaaggaataatagacagcaatgatatctttagcaacttcttcaaatcgataggctgtaccatacatgacataatcataatcatcagccaacgatctttcatttggttgtggaggtctccaactgttagtcttgctgccagtgctactactgttactgccatcgttattagagtcgatatccaaagaagaagctagagtaactgttaattgttcttgtggttgtactgggaatagttcaatatttatatctagtgtcaatttacattgttcttgagtggttgatatggcttcgatacgagagattctattataacgacccggatcggtttctgtcactgtaaatacatcatcaaataaagtgttagacataatgaaaaagttatttctgctatctgttttttgttatctgttgtctttttctatctatagattggtttagaagtgttgcgatatgtaactggaagaattgtattgcaatttggtataataatatatgtttaccatctaaatcatctcttcctgcgcatacacttcttattttcgactggtaaattttttttttttgacaaaacatctgggaaaaaaaaaagaaaaagctttgaatcaatatattttacatcactaaatacgaatggaagcttaagaggatcaaaaggaagacattatatataatggatacattaacaatagtcttgataaaaaggaggaagataagaaaataaagaatgttgattgatagaaataaatgtattgccaacgataatgtatatatatgtatatatatgaaacaggatattattacaaatggatactatttaatcatatacatatacatatatatgatgtgtatgtatatgcttattattcagtggttcgtcaactctattacatatatgattttaaaattatatttcattttacaacctttttttatagttttttttttatttgatttaatttgattttttatctttatttttatttactagtttaagttaatttagtagtagtgtgtctctttgacttataatccttgattgcggcttttatagcatcttcagccaacatggagcaatgcagtttaactgggggcaatgacaattctttcgcgatttctgtgttcttaatcttttgagcatcttcgatcttcataccgtgaaccaactcagtcatataagacgaagaagcgatagcggaaccgcaaccaaaagtcttaaatttaacattttcaataacaccggtttcgtcattcacctgtatttgtaattttataacatcaccgcatgcaggagcaccgactataccggttcccacattagaggccttcttatccagagaaccgacatttcttggattagtgtaatgatcaataacttttggatgatacagtcttctcgatattattgaggaagaagatattatgtttcttgggacgtatctaaatgttgttggcttgagtatgtttgaaaatagtatagatgagttcattattattaaatgctttaataagtggtgctattaaatgatataataatagtaataatacagtaatattaatttatgtttgcgtgttatgaatgccaatagagtagtttctggtgtatatatggttttcttcctctctgtgatagtttacgttgataaatatagatgtatgtatatttgcaaatatagtagcagatatggatagatgagaactatagggaaacaaaaaaaaaacaaagttatctggtttcaagatcaagatgtaaatatatatatatatatttatatacgtatgtatgtatgtatgtatgtatgtatgtatgtacgtatgattaagtaacttttatatatttagatatagtgattaaaattaaaccaataaagcgatacaaaataatataaaaaaaaaaaaaaaagaaaaacacaaaggaaaggaattatctaattaatcatcaactcaattttaattccttcaaaacagaaaaataaaaagaaaaaaagaaaaaggaaaagagttgtgagaagtgtgaggaaaaatgaggaatccagaatccaaaaatcgactgtttttcgattactaaaaccaacctcacttgatgttttttggggatagagcagagagaaatcacagagtattattcccggcctatattactctactctcacaaaattattcagaactacgtccgggacctacgaggacagggctttacgcgctaaacaaataaagaacgaaaacaaaagaaaacaccgcaagtaaggaaaaataacgctgaatactaaattcctgcgataaaaaaactaaggaaaaatcaagaaaaattaggaaaaaaatagggtgtgggtcacgtggacgtttatttccggcccggtttatcgattattttttttcttgttatatgattatttcaattttttgtgtttcattcaatggaagtaaatgaaggagaaagagaggtgcagaggggggaggagacgggagaaaaaaaaacttaacaaattgtgtaggtttgttttctccgtcgttataactccgggtcatttcattcaattcttgtgttgtttttttatttcattttattttatctttatcttcttactttttttgtttgtttatcttcattttcttttttttttttttttttttttttttttttgcaggatgtgtgcaaaccaagatatccatcgcgttaattgtgatagtcaccataagtatacttcattagaaagtctaagtcaagactgtaaagtggatattcaaagaacgaaaacaaaactggatatcaggtttgttttatttaattcttttatattatcaaagatatcatcttgtgttatagtgatttgacttatgttaaacaacaaagcaataactgccctttttttttacatggaatgttgcagataaattacaagtcgatttaaaatgttttgtcacttgtttttctttcctcaattatatatatagcataatccaggttcgtatcaatacaaatgtgtcattttaaagaaccaaaataaaaacagagaaaataactaacattttttgttttcttggttcgattttatttgttctagttttgttttttgttcttttgtcctttctttcttttttttgccttttttttatcattgcgtatagaaaatttcgataaagagaaaatctaccagtaaaaaaaaaaaatcaaaagaaaatttaaggggccaagacaaaacggatttttcaacatgagagaaagagaagatatattaaaataggtaagatctaaccaggttattactatgttattataacactttgaagataaggtttgtacatttatataaatacatacatatatatatatatatatatgtatatatatacgtttgttcgttcgtttcatttacttattcagtcctttcaggttgttgaataaaagaaggctgtgtatatgaacgaaagctagtattgatatcaatgacttctttacctccacctagtgattttgatgtccccctagattggttatataagggaaagagaaaaaataaactcaaacctattatagtgtctaccaattccaaacctactactggtcaggctaatgaaaattcacactcctttgccaataaaactacagctacccttacaactacagtcgataacaataacaatcataatcatgagactgttacctcagataaattacatttgaatactgttgacagaagacctagatcttcttccatatcatgtgcctcgttagataacttgtcagattccgagcatgttaagcctgccattctccctgaaaagtccagtaattctcgaaatattccaacaagaagtagaagttcttctatgtcgcatattatgaacattatgaatagtacaccaacgtctactactaataacagccataacaatatagaagggaaaaaaaaatctttcatcagttctctatttagcaggagaagtagtgtaagtgccagccacagtacaaatgatagtcaacatgaaagtaataaaaaagatagtgtgcatatacctcatataccaacatcaaacccgattgatgatgattttagtccacataacgttggaaatagtatccccttgcatgtgggtagtcctgatttccattcatatgcgtctccatcttcaccatcaccagtattccaacaccattcccttcatgaaagcatttcagcatctatagaacatcaatcgtcatccaagccaactttgggtcaattattaaatgttccattaaaaagagtcacatttgcagtcgacaaatttgaaggtgacccagcacagcaactgccttctagaaaacctaaggttgggaatgttcttattccagatgatatgataagtgatattccttcaatatctgttggtataactaatactggtgatgaacataaccatcctcaacttaaaattacaaaggactctaaagagtataaacacgcattagaagtttacactagatatttgaaagaatctatgaaacatcaacaagaagcacataaggctgctgaaaagatggcgaaagaagtgaaaagttttagtgaaagggtacataggagaaattctctttcattgacaaaggaacagtttggtttatttatagaccctaataaaaatgatgacagtagaagagttactaatagtaatggtaataatattgaagatgagcatcctataggtggccattcaacatttattaatgtatcaaataataatatagataagcaactaaatgttcatgaacattatttccgacaaagtgaagagttacacacatcctctgtattgactctggatatcatctatacaagatgctgtcatttaagggaaattttaccaatcccttctacattacgacaactgaaggggaagactgcccctttacacgtattaaaatttttaaatcctagacctactttaatcgatattttatcattttgtgattttattgctatcgtacctatccataatgttatttttgataacgttacattaaattcgggaatgcttagaattgttttgagttcattggctacttcaactaccctagaaaaaataggactgagaaatgtagtcatttcacaaagtgattggccatttttttgtaagtttttatttaagaatgaatctttaactaagttagatatatcacaaacaaagacgaaatcagatttatctttaaaggattatagagaacatatgaagtgggaccttttgactgatgtgataaaattaagaaaaggcaaacctttagaagaattattgttaaatgggatcaagttaattcatattccattgtcacaatttcagaatttgttaactgtgtttggtgagaagtaccgccaatcttatttggaggcatcaagtttgtcagtgacatctttgaatgggttgcaatttaatggctctgataatatagggattagattaggtttggctgctactgagataacagaagactatttagtaaccgtgttagattggatgtcacgctattctgtacaaggtgttgatttttcttttaataacttggatccatttttaaggatatttgccaagaagttttctagcctaccgtttgataatctacaatatttcactttaaataacgccaatatttccaatgttacagatttagcattattgttaaagtatttgtcaaggttacctaatgtgaaatatttagatttatcaaacatgccagatgtgtttcctggcatcattccttatctttacaaatatctacctagatttcctaacttaaagagaattcatattgataataatgatttgaagtacagacaaattatcgtactatgtagcatattatcgaaatgtaaaacgctttctcacatctcattattgtatgaattgaaacataacgatacatccaatggtggtggtgttcatggtaatggtattatcaataccagtaggaatgaaaataatttcagtaataaaaaggatatatataagcaacagtttttcacaagaaacactgtttgggctacattgtatgctttggtccgtgattctcctaatttattttccttggacattgattatgatcaagtacctgacgaaatccagtctagaattgcattgtgtttaatgaagaatatgcaacacgctgttaattcagatattcaggttgatgcattatcttctcaagatcaattattgtttgatggttcattagtagctgaaactgcagatgatgtgttaaaaaaattgaacaacaacacattaatggataaagacccacatcttgttgctactaagaattatatattgaagaaatattttgaaaacttagaaaatctattacaaaatgttcaagaaactattgataatgtttttgaaaaaaggaaaaccggtgaattaccatctaaggaaaaagagaatttattaagattattgttattagaaaagaatttgaagaatattatcgaggttgccacatcgacaccaactatacctcacagcatcaaagattctcttgttagttcgattaacaatggagacgagcaatctataacatctgttggtgtctctaggccattattaaaacatttagattcggctagattgatggcagaagtggttggggaagatgaccacgagaatgattcaacggtaccacatacagttgcaacagaggatgataataaaatagtagatataaacacaggtaaacctattctttataaatctacgtcttcaacatcacttcaaaataaattacaagagaaggaagagggtgaactacataaatgggggttctttgtacagcaacaaaggtcgatgtatccttcagataaagacttatcggaagaagagtttaaaattagaaatgaagatgaagataacgagagtaagaccatgtatgcatctgataagcaagattttgttcctcaactatctactccaaatcttgattcaggtacatcaacaccagtgtctcgcaagatattaactcgtattccatctggtgaagaattaaggagagctattatcaaagccaaaggtatggctactatggatgaattaattcagaatgtggcagctaataaacaagaattagagaagatatataatgcagcatatttcttaacaggtcaagctaaaaacaatgaagataataaagatgaacagaaaaaataacttttaaagaaatatataatgaatacaatacctgtctgttgtactggttcagagcaatttatcataattattagacaaatatatatgtgccgaaatgtttaataacagtttttttttttattaaggaaaactttgaacaattttttttgatacttttctgaagtatttcatgataaactcgatgtgttgaaaaagatgttttatttattctttttgttttaatgtacgtatatctatataacatgtttgcccacaacttaacaattgtatatattttatgtcaagcttttaagttaggtttagattttgggaatggaataaagtccttataattgtttttgaaaattttttaaatttatgcaaaatcaagcattaccagtcaactagttaagtgtaatactatttaccagttgattattgtgtaattcacatttctaattcttgaatcagtataattgtgtttttttatatcaaaagttatattttttttgtttatgctatcaatacatattttatattagggcttatatgactttatagagaattctaacgttttgaaatcatctgttaagcacactcaatactactgctatatgaataaacctaatttttttttttcagaaactgctcaactaatcaattaataaataaaagtattttcctattttggacaatagttttgatgtattgttttgtatttctgtatctgtcaaaatttttattgtaatatttttttgtttttttatgccttttataattctattcttttgttttaaaataaggtattgtttttaatattgtttgcttttggttttttttttacttttttttttttcttttttttgaaaaactcgaggaaaaaaatctaataaaaagaaagttgaacgatgccttttccttttgtggggtttcatccataagtgttgaatttggaaatctttgagatggaaggattaattctagttacttatttttggtaattatagactatttttccattgcctaataatgattgtatacatagattcatcgatttacaaagacaattaagtatagtgaaaatttacatctttgataggttcaaagatattccagaaactaaaatagtgagcagtaaaaaaaataataataataaaagaagaagggacataagattggataattacccaaatgactcagcataaaagaaaatctattgctttatggaggagatctactccttcattatatcatcatctttccagttttaaacccagttttattagtagtgtagataatatgaggaaattgcataagactatcatatttagaagcgaagttattcctgataaagaacgtgggtttttgagtacgagtttactgtattcccaaggtagcgatatatatgaaattgactgcaatttaccattgggttccttttataaagagagtgaaagtttacttagtggaggatttgagaataaagaaaccagcgattctattcacaaagataacaaagacatcaacgcgttcgaagatgcaagcacaaaaaaactgaactctaaatggatttactctggagaaaccatagctaaaatggcatatttggatgattcagaagatagtacagttattgttatgtctaaaaatgggtcattggcttggtttagggatgggataaaagtgcctattcatattgtacaagagatgatggggccatctactagtttttctgctattcattcgcataagagacctaatgatttagctgtatctgattttggattatctgagagtttagagacgttagttaagtcacaggcaaatggtacagaagaaaatagtatattgaaaattgtagataattctggtaaaccgggagaaatactacgagtaatacatgttccaggtaccacagtgacgcacacagtgagattctttgataataatatatttggtttatgttctgacgataatacagtcagattttgggatgttagaactgctaatgaacctattttttctttgagtgaacctaagaatggtaagttaacagcattcgatgcttcacaggttacaaatgaattatttatcacgggtacttcgacaggtgttattaagttatgggatatccgtgctgtggaatttgcttctaaggacctatcgtataggcagaatggagaagatccaatccaaaatgaattggtcagtttatgtcattctggtggtgactctgtgattgatgttcaattttcaaaaatttcatcagcagagtttttaactgttggcaatacaggaaatgtttatcattgggatatggaatatttcttttctagaaatgacgatgataatgagcagcaatattctacatcgaaacgtgtaagaaggactacaacaaacagtataccagctcttgaagaattacaaggtcaatgtttgaaatttttccatagtggtgtttctaataataatggtagcagtagtagtaaatttggaagaaagaatacggtagcatggcatccaattattgatgatcttgtatgtacagttaatgattcctcattagtatcagtttataaaccattcacgttaaaaagcagtaatccacatgattgatataaacaggaataatgaagaaaagtaaaaactagtaagggaacttaatatacattaagttgatatgaaaaatagtgtctttagtaattgaaaagaaaaagaaaaataaagaaagaggcataaaaacagatttttcatctaaatctccttaatttttttcttttttattagtttcttacatatgtatagatatgctatgtaccttttgtcagcttaaattggattaaactggattattttttacattaaagtgttattatatatattcaaatgattatttttatggaagaaattatttactcttagaaaatagtagaagttgcgtattaatgtgttatgttatattattttaaagaatgtatgattagcttactttctctatatatataagatatataaataaaagaaaataatgttaatttatagtaaaacctaaagaatcacagggcaaaccagcttcttcttaaatgagactctataatataacgattttatgcaatcaccaatggaactaaatattagttctgttgtaagagagctttttaccaaatgtatataacttattgctattttgttgattatatttttttaagacttctgaataggtctttttttaacattactgttattattaccacaaagaaccaaaaaaagaaacaatatgttaaaaatattaccaaaaaagtaagagaatcttattcttgagaaaaacccctgacacaaaattttagggtaccaggtagagagactcaaaaaataaacaattttgaggacagtacaaaaagtttcaaagtgaagaacccacttcttgcattgagatatttgcttatagactgtacaaaatatcattaaattaagggaaaaaaaaaagttgattactactcttatcaattatatttttatcaataccaattactaggacagtcttctcaatgaaagaaacaaaacactgcactatcaatcaatcttaaaataggacattctagtcataacagtttacataagacggtatatatagaagaccaacatttggtttttgttcgaagtatttttcccacaagaattctaagaatagaaagaaatttatatactctatatacaataagaataattcatagctatactacactgcatatacacatttaaaaaaaaaaaagaaataaagaaaaattattgaaacacctcaattatagcaaagcataaaaaatcatttaaaactaaacaacactgctgaattattattacttcaagcatactcatcaatgttttaagatcaacgcagcatctagtttagaatctaaactactactcttctgaatcactggaggcgccatatctgtggtctttaaggatctgtagtatcagaaaaccagacataacgatgtttgatttagttaattgaagttcataaccatatattcgatttctctccactccctccattccccttacaaattaaatacgttcacactcattctaataaataatacaagtgtatctttgcccttaagttgtttccttttcttttcttttcttttctttccctccccttgtctcctctttatctcaaaaatgtcatcacctcacttttctctatgacttgtttccttcttattttcttttgcaaacaattttttttctatacaaacgggaaaacacaaagggaaaataaaaaacttaaataattattactaataataaaaataaacaatttggtctattgttctattcttttcaattttaccggaaaaacaaaaatctaaaaaataataaaacacaaaacaaaacgaaacaaaaaaaaagaaaaagaaaaggtagaaaaaaaaagaaaaaggggaaacccatacatttcaacgaaaaagagaggaggctgaacgaagaaaaataaaaaatagaaaaaaacaaaaaaagaaaagaagaaaaaaaaaggggaaactgtagctattattgatgaaagaaaagatgatgacattaaaaaaaaaaaacatcctccttaattttcagcacattatctattttcattattgcatgaaacacataaataaatatataaatataaatataaatatatatatatagacatatatatacaagttctttagttaattgttgttcaatttctatatttacacagatttagtcactttgaatcgtttgtccttccataccctcctccattttcttttttagtccttttttctcttgctcttgtattttagtttgctcgtttaaatttttctacaccttatgaaacacaatccaagtaaaataaaataaacatcgtagttctctatctaaatcatacgcttaccaccctatctcatataattcctcataagaagacaaaaatgactaagatatataaaccatcaacttatgaacatatctcctctttgaagccaaagtttgtttctcgtgttgattctaccttacaccaggacaaatccatcacttttagcaacaaaattgtaccagacaaggaagcaaacgctattaacacaagtatcatttactcccaaggttctgatatctacgaaatcgattgctctttacctatcgacgatacaatcacagaaaaagtgccaaaatcagaaaatgaatacggagatgcttttgcttctgtggaacagaaacgcttgagtccatcctgggtctatcaaggtgaaactgtctctaaggtagaatatttaggaaacagtaatgacaccaccttagtagctatgtccaagaatggttcattagcttggttcaaagatggtattaaagtcccagttcatatagttcaagaaatgatgggtcctgccactagttttgctgccatgcactctcatgttagaccaaactccttagctgttgctgattttggcttgtcattcgactctgaaactattgttaaatcccaagcaagtggttctactgaagaaagtattttgaaaattatcgataatgcaggtaaaccaagtgaaatcttaagaaccattcgcgtaccaggtaccaatgttgcacacactgtcagattctttgacaaccatttatttgcatcctgttctgatgataacgtcttaagattctgggatgttagaactgctgataaacctctattcgttttgagtgatcctcaaaatggaagattgacctcctttgatgcttccactgtaaccaataacttgtttgtcaccggtttttctactggtgttattaagttatgggatgtacgcgctgttgaaaatgctaccactgatttcacaaatagacaaaatggtgaagaaccaattcagaaggaagttgcaaacttctaccattccggtggcgattctgtcgaagatgtccaattttcctacactgcaccatatgaagttattactgttggtggctctggtaatgtctaccactgggatatggaatatgctttatccaactatgatgaggatgatacttctaatctaccacaagatgcaactgaagaattacaaactcaatccttaaagtttgtccatactggtgtttcaagaagattaaccaaacagaagggtaaaaagaacattgttgcatggcatccaattatcgatggttatgttggaactgtcgatgatgattcgttagtttctgtttacaaaccattcactatagaagctgaaaatagtaaagagtaggtacttggagatgaaaaaaaaataagattaattaaatataacttttgtatttctttttatcttttctttgaatctctatttatctttttcttattctcctttctgatacaatcgcacagttcttcttttatcagtgtgtttttttgacactccctttcattatttaatatttcacctgtatacacatatatacataaacatatgcatatatacgtaacataagacacacctcagtttattttattcagataataaacgaacaagcaaacaaacaagctttataaaattataacttttaatactttattttataactattgctgtaataaggaatagagggatactctccatcaactctaaatcatgtttcctcaattggtaaagctattccatagtttttagcaactatgtcatttaacgacctttttacaagtatagacaaaccatcataacctttactactgactaaatcttctactccatgggagatactgacttaagagaattgtataagcttgaacatttttttcttcgctattgacaatatagaaaatgcaagaaatacagattataaaaaatcttaaaaaaatttttgtagatatcacaaataatcttcttttttttttttttttttttttatttttatttttttttttttctttttttgaataaaaagaaaatgataatatacagaaacgtagaaaaagatagatacgtgtagaaaaagaatctagtggatacgtacttgactgtatatcaagtaaaataaaacagtgactttcaattttagatggactcacttccttcgcttcccaaaacatagctaatacacacatataaataattttttttttatcatttttttttattattaactagctgatcttattctgttctcttcctataaaaaaaaccatacatatcaatatactattccttatatggatcaaaggaaatcaacttatagtacatacgaatagatccatcttgaaatatactatcacatacatatagacatacacagacacatataaacagatctgtatacatatacatattccaatacatattaaaaagcatttttaacaaatcacgaagggaaaacaatatttgctagaaatatatagcataaacattgtcgtataaactaagagatggcatcactttttcgaccacctgaatcacatagatcacattccaatgcaccaaaactgaaattaccatcattaatcaatgatgtttccacaccatcaccaaaccgtcctattttcaaagataaggatgaaccaaaaacatctatatcctacaaagaaaacgtatcattagatgtaccgattcaaactgacatgatgaccagcgggcagaataacacaaaaagacaactatcacccaacatatatacacgtcctactaattcaaaacctaaccaagctccttcattatctttaccaacaatatcgcctatatcatcaacccattcttcaaaatcaccaatcactttgaaaaacaggcctcttcctccaccaatcccacaactgaatataaatataatctctgaaagtacttcaacaaaaacgtctagatcactttcatctcaaagaaatagacgtccatctccacctatggttgatgaagatttgtctaatgcattgaaaaatatatccataacggcaggttctgaaaccatctcgaaattcccagttcgaatgaacaataatgatacacatatgagtaataacaacagcaatagtagtagtaacaataatactagtaatagtaatcataatagtaataaacctttatatttaatggataacttagcagattctacagactcatatttctccacaattatttcctcatatgaagatggaacaagtgagagcacaaacaatagtccacagaaaaataacactaaattatctaatgtgatagagcgtgagtcgcaagaattagattctatactcattcaaagagatgtagatcaattagatgaatctgtttggaaagatgccaacattaaaaatcaaatagtcacattaggaatgttaggagaaggtgcaggaggatctgtggctaaatgtagattaaaaacaggcagtaaaatattcgcacttaaaacaatcaatattttaaacacagatcccgaattccaaaaacagatatttagagaactacaattcaatagaagtttcaaatctgattatattgtaaggtattacggaatgtttagagatgaattgaattgttcaatatatatcgctatggaatacatgggtggtaaatccttagatgcagtatataaaaacttactggcacgtggaggtagaattagtgaaaaagttcttggaaagatagctgaagatgtattaagagggctatcctatctacatgaaaagaaagttatacatagggatatcaaaccacaaaatattttatttaatgaaaaaggtgaagtaaaattgtgtgattttggcgttagtggtgaagcagtaaattcattagcgaccacttttacaggcacatccttttacatggcacctgaaagaatccagggtgaaccatatagtgttacatgtgatgtatggtcacttggtttaactattttagaagtagcccaaggccatttcccatttggatcagaaaagattactgtcaatattgcacctattgaattgttagtcatgatattaacttttacaccagaattaagagatgaaccagagaacaatattagttggagtaattcatttaaatcttttgtcgaatattgtttgaaaaaggatccaaaagaaagaccatctcctagacaaatgttgaaacatccatggatacaaggtcaaatgaaaaagaacgttaatatggcgaagtttattaaaaaatgctgggaggatgaataaattatattaatacgttaaagaagtaatttgtgaaatcacatttactaatattcacataacttttcaatgtacttttttcattttttcagttttttttgcacaatatctacacacacacacacacatatatatattatttacatgcatgcagccttatggatagagcagaaattacttagtaatatataactatgttactaataagtaaaaatgaatcaagccgttactggagcttattacggtatattcaactaataaaatatatgaagaaaaaaagtaaaagatatcatatcttgtagataaatcatgagtctaatattatttattttattccacaattattataactttttgatatcttttaacatgcttttcattgttgtctttatttcacaatgaatcaccaaaatttatgttgaactacctcgagaatctttaatagttttgtttgtgaaccctctccttctcctctttcttccttgacttctaatatttgtatccttgatcatttggattttccccatctgaaaaaaaaaataaatattgccttacaaaattatgttttttgtgggtaaaatctaagaataattttaaaaaccctacttttgtgtattttggttggatctccaacactgaacttttaggtaaaaacaaaacaaacccccaaaagctttaaaaaaaacaagagcagatgtaaattctccactttttctccccaaatagcaactgcatagaagaacggaaaacagcgacatcgacatcaacgacgacggcaaactccacaggaatttaattgaaaaaagaaataaaaaaaaaaaaataaaaatcaaaatcaaaatcagtcactcgaccattttattgatgacaaggaaacaaacagaagaaaaaatctttgattctaagttaaacagtgatatattaaagcttgcattaagaatttgaatctaattgtttgttcctccattctcttttttgcatgtctttcttctttttgtttttatgatcttggcaggacaactttaaaattagagtgcataaatcaatagtaataccaatattgatcaactttattgccaaatattcgtatctcccttctttcacaacaacgcaagaaataacaacaacgaaatattaccaatcaaacaaacatgaaagcatttaccgcatccttaaccagattaccagttagatacagtactgttccaagaaccatggcctttgctgccaattccagaattatgtctgttcctcaaccttctattatgagactttcattaaggacttatgctgatgaagctaaaccaaaagaagaaacagaaaagaaggaaagcgcaaccaaaaaagatgaaaatactaacttgacagaagaacagaagcaaatccaggacttacaaacaaaattggacgctaagactaaagaagctgttgaattaaaggatagattgttaagagctgttgctgattttagaaatttacaagaagttaccaaaaaagatattaaaaaagcaaaggattttgctttacaaaaatttgccaaagatctattagaatcagttgacaattttggtcacgccttggctgcttttaaagaggaagatatcaagaaatctaaagaaattagtgacctatatactggtgttagaatgaccaaggatgtctttgaaagcaccttaagaaaacatggtattgaaaaattggatccattaggtgagccattcgatccaaataagcatgaagccacttttgaattggctcaaaaggataaagaacccggtacagttttccatgtacaacaattaggttacactttaaatgatagagttatcagacccgctaaagttggtgttgttaagttagaggataattgaataaagattggtcttttttactatattacgtaacaattgacttctctttctctctccttctttttttttatttttattttcctgcttacttgtttattttatctttcaaaatttcctatctcacatcatttctcccgcctgtacatatgatgaaatgtaacatctagtattattattatgattatttagctatgtgtttattgtaatgtatttttaataatgaaataaaaattgtaatgtatatgcatgtatcaagttacaggtgtttacgtctctatattatcacaaagacaaaaagtaaaaaaagaaatacgcttatgtgcatagatgtgagtataaaagaataaccttattgtattatccaataacttaatcatcataattcaatttctatttttataacttgtattaccaagatttcccaccaacctgattagttttaatctgtaatttttacttaactgctttttccatggcaaccgcgtttcattttattttttgttttgttttgttttgtgttgttttctttttcttttttttttatttttcttttaaagcaattaaataaaagaaacaaagatcaaacacaaagagaatgtcttagatatgaaaaaaatgttagacggatagtacgacatatataggtgaaacttcgtatttaaaaaaggcacctattaaaccaattgcttgttactttataaattacactattctttgggattacatctttgatatatatatatatatatattgcaacattctattatttcatattgtatcattctaattatttctttgcttatagtttctcttaattaaaggagaaaagagacttggaattgaattactcaattactcaacaaaaaaacgtttctccatgaatgagtcaacaagtagtgtgaaaacaagtttaccttatgacaatgatgaaaataaaaacctttcttctcaacctgtgaaaaaatacgtgacttttggaccatatataatcggttctacactaggtgaaggtgaatttggtaaagttaaactaggttggaccaaaattgctagttccaatgaaataccgaaacaagtagcaattaaattgattagaagagataacttaaaaggcaatccagagaaagaaatgaaaatatatcgtgaaattaatgctttaaaatatctgaaccatccaaatataatcaaattagaagaaatattacagaattcaaaatacattggtatagtattggaatatgcatcaggaggtgaattttataaatatatccaaagaaagagacggttaaaggagaatattgcatgtaaattattttcacagttaatcagtggagttggctatatgcattataaaggtttagtgcacagagatcttaagttggaaaatttattgctagataaagatgaaaatttaattataacagattttggttttgttaatgaattctctttacaaaaaagattgatgaacacatcatgtggttccccttgctatgcagcacctgaattagtagtcaccacacaaccttatgaaggtaccagggctgatacttggtcgtgtggtgtgattttatttgccatgcttgctggctatttaccatgggatgatgatccagccaatcctgatggcgatgacatagctagattgtatcaatatatcactagtaccccattaaagtttcctgattatattaatccattagcaagagatctactaagaaagatcttagtagcagatccaaggaaaagatataccattgaaagaatacgggcacatgaatggttggccaaatactatgatttcttgagtatatcatcatatgattgggatgttgctggaaagttaggatcaacaacattagtatccccaagaagtacaacatcgaaccgtagaccgaagacaagacctcattctatgatttctaacacacacaattcattaacatccaaatttgcatgggaagagtctagaattgctcagttatcgtcatcaatgcataaattaaatattttaaaagaggatgataccgaagatatgacaaaaacaccaaatgatgaaccgactctcagtaatatattatctaaagatatagacataaatcaaaactttcctcctcatgatttaaaaacaacaaacttatctaataaattagttcattcaaagcctagacctacaacattacatattacaatcaatccatctttagaacctgtaatattaaatgataataacaccacagtgactaatctacgcagcggcaataataacaaatacagtaaaacatattctaagaaaagtttaaatcaatatgaacccaagaatatagctataatagacactataaatgaaaatagctcaaatattgatactagtacaaacataaaaagctcattcctaccgatcaagaaccaaaataataaagaaaatgactatattaacattaaaaggaacagtgttaatgtgaaaaatgtcccaaatgataataacccatcaaaaaaaataataaataaaaatagtaataagataaacactatttcgaaatcctctgtagaaacagaatttaacccaaataaacatgtatatacaaacaatgattctaagtcatcttttaaagcatcaagtgaatctgtttccattactgaaaagaagaggtttagtttcttgtctatccattcaacgtatagttctgctaaatctagtttaagatctgatgaaaatgggaaaacttcatctagaccaggaagatcttcttctataaatactaagcagaatagtaactcactgcatatttatctgcaccatccaagaaatatatcatcacatcaaactagagtagattctagaaatagtgcaaaatatccaactgcttcaccaagtacagtagatgcaaacgatacatacagaaacactggcacaaaagaaaattcttttactcctattgataataatcttaaccacgcatcaaatagtatagataataaagaaatagtaagtaatactattaactccaatgccacaacgaaaaagaaaagcaaacgatcatcaataatgatttcatctctaaaaccagataaaaagaaaacggatgcacctattagacgagattcctcaactgctaggaaagttattgatttctttaaaagaaaaagtaccatattataatataatattcttataattaatcattcaaaactgataacatatattaacgaaactttatatatatatcatacatatatatattagtatacaaataaaattttttttaaaaaaaaaatagagcattgcattctctctttcacattttcaatttgaaacattcattttaaatatatatgagagtgacacttgactttgtccaaagcattacacaattcaatctggaaaagtcgaagaagcaaaataagtgattgacagtatgcccatctataacatataaaaaatattacgtgtttatttttttttttacaatgatatattattaaatatcttacttatacgatatatttatataataatagtaataacagataattgattgtatttataggactaactttatgtttatattagtagtaatgattaaaaatagctacttcttattacgaaataaaaaaatacttaaaatatctttattatatttttatttaaatattagatgggtataagaagattctaacggaagcaccaaaggtcttagctggtaagttgtttctgaatttagctctaacaacaccggagttaccgtgagttctggtaatcttaccccacatgactctgatcttagaacctctaatttccttagaagctctgtagacgtaagcaacacgcttacccaagtagaattgagcttcttgtggagtagcaacaccttcaatctttaataaagagacatttgggttgttaacactcttggatctttggtaggataagtgcttacctttgacgtatactgttcaaaaaaaagatttatatatgcataatttatgagaatattataatgtaaaactaatatgtacggcattattctcataaaagaacaagaaatttgttagtatcattttccaataattaataaacgaaatgactagctcatgtaaattactttattattatattactacaatctgtccaaaaaaaccaaaaaaataaagatatgcttattttctgttagataagaacaaaactcttcatacttctgaaccatttcagtcacttgttgaaattgtcacaggtttatattatctcttcaactgggaaaaaaacttaaaatataatacgcctaatttttaaaattctgggaaatccccataatatctcttcgacttagttcacactaatgaaacattctaattctcttctttttttcttttcacagtcattttaatgcaactattactaatataacacatattcttctgatatacactcaacattcaatattaatattcaaatacagaggtagtctcctattttatttccaaaattgattatagactaaaaaaaaacatacatctgtgggattcagccatctttgtgtttgattttgcttcgtcttctgggtccaagggggggcaagagagttataagtagagagttcttaaaatccaacacacctaagagatatagcactttgcattctatcagttatcgtaaacgactaatcagttatggcaagttacaggtactaactagtatgcactaacagggaacctacacagataggtggagtatcgaacaatactaacgaaattttcgcaataatacaaaacatgttgttgtttctgactctacagtaaagaagttctgcaagacagttgctagaacacgatggaggagtagtaaggtatgctagtaaaaggacatagacctgcttggggtgaatattctattactgcttgctgcattgctacggtgctacacaaagagcgaaaagcgggaaacacctagtttacgggtctccattactagttctcatgtgtgttgtgaggagtagaagtcagacctccaatctcaccttccctcaaccctctctctaattggaaagatgggaaggaaaaggccaggccagggtcaggatcccagtttctttgagaacaggcagctgttggttccctgagctacaagtaaaaagttgctctcccaatcctctgtctcccacctcactccatgtataagaaaatcgtgtatagaaagaaaataaagagagaaatcacgcgtaaattgcatctaactaggtctgagagtccattaattaactggtcaatgtgcgttgttgaaataaaatgaaatggacagacgaagtttctgatctcatattccatgaaaagaaaatttcagtgaactcttgcatacatttaattgaaaaaaaaaaacagcaaagcacttttttattactatggatgtatgggtttaaaaacagtctcaattttcttggttatttattttgttgacgtgctaaaactttttataaaaccctaacattttccatataaatatcatactgcacgatgtagattgaaaacaatagaaaagtgtaacctgaagtgtattcttttttttttttcactaaagcaagagaattcaatttgagttagaaaacatataaaaaggcgttgaatgtcagttgccaacgattggctaaccttctttcttacttactttgtttttctttcattcccttcctaagagaactgtcgacgtacttcagtatgtgttatacccataagttattgatttaaatgatgtgtgcttcgtatggttgttgttggtggaaggtgtgcatgtgtaccctcgattaacataaaactacacgagagcatacattatttcctggcctatttggcaactaattttacagaatttttttttatttgatttatttgactaacaccttcaacagtaggatcatttctataggaatcgtcactctttgactcttcaaaaaagtcactgaatccaacttggttgatgagccgcatagccttcttacctaagagtgagacttcaaatttattaaatttaaaaattaacattagcttggtctgcaatccttagcggttcggtcatctaatattttaaattatcaaaactaaatttgattttgccggttgcaagtggacttatttttaggtctataaaaataattggcgcgatgatctttaccctttctatgtacatctctcgtggatgggatagaatattgggtgggtaggaatggcagtctgacaagtttatcaactttttatttctttattcctaatttaaatttcatcaaaggtttgatgaatgatttaggggtatgcaaatcatcaatactgaatgtgtgtttatatatatatgcacgtgagtttatatatgtatgtgtatatacctatgtacacatgtgtgtttaaatatgcgttgttgtgtgtggatcacctattatgtactttattcctcattgtatctctacccgctagtttatgcaataatagattccaataggtctttgcactttttcaaaataaacagttggtccattgggaagctggtgttttcaatactttgtgatgaactccaagcaacataacatggtttaccatatttcctcgctatagacactgcaatctttcttgatacttcactgatccaatcattaactgaagatattagtggtatatccacgatgtctttcgagttgtacctgggaatcgcatagtgataacattgtaattttgcaatttcttgtgaatcattgacattacggaaagtcaaagatatggggatacgtttactgttttcactatcaatattatttggtattgtagctataatttctattggaacaaatacttcattatttgatgcatctcttgatacagttctctttactgtttttaccaacattgtgtgctttcttcttttgaaatatttgctagatttcccttaaccaacaaattctactgatatataataattatttttctttgtaaatgataataataataacaacactagcaaatgataacaaatatgcaagtttttatttattaaagagataaaataaaagagacttaactatttctaataaaaatacataaaattattatgtaaatattaactctattcttcactagtttcttatattctgaattgcatctattcagtatatacaggaaataaaattagtctccttttctccccttctcgattctttggttcctttgaactgttctctagtatagttttgacatttttattttctttttttatttaaattttgcaaattttcatactcaaaagaaaatttgataaaagattataaccggccattgttccaaagacaaacaagcaaacattgcatataaaggaaagaacattaaaacgcttgttgctttcaattcaagctaaaagtagatctaatttattgtcttctagaagcatttacacctaatcttcttctttgtttctatttttttcatgccccctaaggttaaaatcaaacatgactgcatctaagatacctgttattgcaatagtagctgcactattaccagaaatggggattggcttccagggtactttaccatggcgtttatccaaagagatgaaatattttaaacaagtaaccacaaatacgtttgattcaaataaatgtaatgcagtgataatgggtagaaaaacatgggaatctatacccaaaagatccagacccctaccgaatagaatgaatgtggttatttcaagaagttttactgaacatttgatctctgaacaaatcaatgatgaaaatacacttaattattataagatcaactctctgcaaggcgccatcaagaagttgaacattttccatcctaatatagaaagaatatacattattggtggtggtgaaatttatgaatcagcatttaatcttattgatcattggttaataaccaaattagaaatactaccaaatgatgaacagaatatggtgcctaccatggatacttttttaaacaaagaaaggttagtaaaacaatttcaacaacgaccaaaatcagatttgtctgaatttctcccatttgatgttaaattacctaattcaaatgaagataatgaaaagggttatcactttgaatacacgctttacagcagaaagtagacataattatactgccccttctcttattttcaacctactatcaatattatttcaataagagtcacacatatgtacgatgggtttttaagcttgtgtagtgttttattgaagataatttaatattaagtctaattattttccctctctttccttttttgttttaattgtatcaaattaaaaacatcgtatggttaaaatatctatttttcctaaaatagaaatgacactaggaatgttactgtaaatacttatttggttgtatttttattttaagtataataatttttcagctgtaacaaatgacaaattacgtgattaactataataccaagcgtttctaacgatctagaaaatctcaaagccaagccacaatgatttacttatttatatacgataatattgcctaactctactaaaatcagttgtaccaattcattaaggcgaataatcaaataaaatgaaagtcacaaccttccaagaaaactcctcttatcgtatacactgaggttacgacagtaactaaacgacagccttgtattacagtcctgtcttttgttttctcgttccttaaatctgtcaaaaaatggaaactccattcttgaaaatttgttttttttatttttatttcgatttctcgagaatagcgatgagcttttactattgtgtattgtttaaggatgattagcaacagacagacaggcatattacaatatttgtatattgcaacgttgcccaaaaaaaaaagaaaaaagaatacaatttaaaggattatactagataaagcaaagtatgtaactagtgattgtttcaagttactaggaattgcgtcaatttatttttcttctcctcctcatcctgtgattatccctatccttttttgtattaatgatgtatgtgttttgtttttatggaggaatatgattagaattatttgatacgactatttctcttgtgaaacgataccctatgttcaattctaatattagaatgtcttaaaacatatataaagatgtcataaacaactgtgatatctggagatgttaaaattactttgaagccacctttatatttaactacaatcagtttgtaccacttgtactattttctcatgaatttctacctttccttcagggaattattagtagaaaaaccgtagatagacattattataaatataaatatttactacaagatacttgcttaaaagtatgacagactactctgaaacaacctcctggacgtcttttttgaaatctgtatcctcattttctggtgatttatctgcctttactgctccaccttttattctttcaccagtttcgttatcagaattctcacaatactgggggacatatcaagatttgtttctagcgattgcccaaataaataaacataaccacgaagcttttttccctcagattagatcagtcaaatcaccaaatgtaacaagaatgttagctgtattacaatggtatttagccactttgaaatgccaatatacatctcgtacccaaggagaccgctttgaaaaaaaacccttaaatccgtttcttggagaattatttgttggtaaatgggaaaatgatggatcaaaaaaggatgacactattttattaacagagcaagtatcacatcatccaccagttaatgccttttctatttttaatgaggatcataatattcgcattcaagggtacactcaaataaaatcatccttttcaaagactctaaaactaaatattagacaaaacggtcacgccatcctggagactaatggtcactcatttctcataacattaccagcactacatttggaaggtatcattgttgcaagaccatatgtagaattagaagatagttcatatatccaatcatctgatggtatgatatggaagattgattattctggtaagggttatttttcaggtcaaaaaaactcttttagtgcatacttatacaaaaataccgctgcaatggagaaacgtgataaacccttgttcacagtaagtggacaatggtctggtgtctccacaattactgatggcaataaagaagtattatttagtgatgtttccaaatataaaccacattcgttacgtgtaaaaccaatatctgaacaacattgtttagaaagtcgaaaagcttgggatgatgttgctagagctattgaattaggtgatatgaaattaatttcacaaactaaaagtaagctagagaatgaacaaagacaattaaggaaaaaggaagaagcgggaaacacaccttggcagaatagatggtttgaaaagatcgatataatcgaggagcagatacaacctgacttgaatggtaatacatataacaaattagttgcattatccaaaatggcaggtctatcaactaaaaatatccaaagcggtcaaaagttagggagtagagaacatagaaaatgtaacacagcattacattgggcttttattcaagataaatggttgcaggaggaagatatcaaagtatagaccatgatctattgtacatatatccacatttatatatttttacataatttattgtatattctattagttatatttgatcttatttgttgttttccagacagcccaatgttttaagttacataacaatttattgtaatattgaagttcttgtttatttcgctttatatagtttattataaagtacatcaagatgttatgtatagtattattcaaccaccactagggtgactaaagaatcgcgtatttatatcagtatttgtagttgattatttagtccaaagatatctggtaattcccccgctgttattactgaaatactttcaaccgaatgacacaaatacgttttagataaaattttcatgattttctcgtaatactttaataggtaagatgcgagatcagttttgagcaatatacaggcaacaaaaatgaccaatagaaaaatgaatatgaagaaaatttaagcctgaaaaaataacaatttcaaaaccacttctttgattcttttgcctcacaaaatatctgacctctcatttaaaaaaaaaaaaatataaagaaaaaataaagcaaactatgccaagaaatcatttaattattttaccttgtcacggaatctggaaaattgattcagcatcggacgataacaattatggtcaattatcagatcagtggtatttagcaccatttcaacttgaaggtaatgatcacttagtctttattaagcaatctttaaaagcgatcgaagaactattacttgattatgaaaacagtgttatactatttagcggttctcaaacgaaaatagatgccggtccaataagtgaggctcaatcatattttctactgatgaaaaaattagtaaatttagctactactaaagatggtttcgaacagttgacttcattatttgatatagagatcaggatattactagaaaacattgttaaacaactggaatcgaataatataagtgtcaacacactcttttccaatggatatataaacacagaggaatatgcattagattcttttgataatttattatattccatacttcgattcaaagaaattactcagtggtatcctaaacatattactattataggatttggttttaaagaatcaagatttttgaattgtcatgcaagagcactagatatccctaaggatattattcgttatatttcatatgaacctgaacctttaaattattcacaggaacaattgaatagatattttgagaatttgatatatatggaaaagaagaatgctcttggtttgtttgaaaatgattggtatgcaaggaaaaatagtttaactaaaaagaaaaatggcagaaatccatataaaaggatagcaagatatgatggtctcaaaatgtttcattttaatgaaacagaattgacagatagtgaacatttcaaaaaatatgttgagggtaaaatgccatggtcgtataaagaatggtaggtatataataactgagcattatagaactatgattttgctttatcataataattttttttttgataaagtaaatcaatcatatctattatccgagcaataagaacttatataacagttaatatttgttgtaaatgatctctttcttgtttccattgttcaacattatgcagcttcttctccaaaacctctatttcattatcaatggatgttattgcttcatctgtaccgagtgtcttcaattcccatttaccctcattaccagaaacttctaatagtaaatcgtggtatttaatcagtgagggcctttgggaaatagatatgaaattaaaacgatacctttttaacatattaaacaaataatcctccatgtcaacacttatagcatttgtagcctcatccaatataataaatttcggtttatggaacataattctggcaaaattcattctttgtttttctccaccacttaacacatctttccaatctgctacagtatctaagtacttccaacctctctccctttttaaaagataatctaaacgaacctcctttaaaacccaaactaatattctgtcattgaagcccttgtcgaagaaatcatctgaggacataggatatatgatttgttctctaaaggtacctcctcttgaaaaatatggtttttgtggaatacaaattaatgatttttcatcgggtcttgacagtagaccatatttattatatatgggccaaatacctgcaatgactcttgcaatagaactcttcccacaactattaggacccaatattaataaactagaattgtctgcgtcgaggaatggtaaagtaatatcgttcatggctactaaatcttgaatagacggtgcttttgatgatacagggtcaatatgaggtggaatttggaaacttaattttttaattaattttattccatgcttacctcttagtgatggaatgataatatcaatattttctaatctgataccattaaaattatgctgcactgtacctgcaataatatcttctttttcatgcttaatatacttgagcaatgaagtggttgtttcaccattgtttactaattgtattagttctttagtagcgccataactgaaatgttccgaatgaactctatgtaaagcacataatagggtaaaaattctattggtatacccggtcaattgagatatatcctttattgaatgcattaatctagaaccggcatcagctaaagaaagcatcaatcttttattgacaataaaatctttcatattattttgttcatttgactttgttttacttaatgtaaaagaagacattataattggtatagacgcaaagatgtaacctaaaccggaccaagtatatttaagaatgtaatcttcaatcatattataattgaattttctcttacttacaatcaacattttgtccattaatgtttcatataattgtttgattttagctctttccacttctgtgccttgataaaaggatatttcctcactattatttatcatgttaacatgataattataataattaccatctgcagcagaactctcactggttaatttacccaatggaggtgtataagaccttaatacatatccagttataaaatagttgatgaagataccggctacaccgactgtgcccaaattatctcttaaataaatggagaaaaatatcagatcaatcacaggtttagtaatattagcaaacactgagcaagttgcatcgcagaatcttgttatatcattggatattgaattgtcgatatttttcaaaacagaacttgttgatttagaatcgaataataacttataaaaagccaatctatcatcaagatacatatcatggatatatcttgtcaatttgactttaaaattaagacttaattttcgttgtagaaattttatagcactattagtatatgaagctggtaaagcgattaagaaccatattagtaaatcaataaggaattttttactttggcctgaaataatatctcttacaatttgaccatctaaccttgcgacaaataaagataaccaggttctcataattagaaaaaatatttgtaaacttaataaaaaagaatttttatcaaagattgaaggtattaagattttagatataacgttaatttgatttaaaaatttcgaatagaataaagaagattttgtctttcctatgtccacacttttaaatataaatttatcgtgctcataaagatcattattctttggagggatataaatttttttctttttaatacttttctttttatcataggtagaagcatcattattgctgtaatgactatgaaaagtaatatctttgttatgtatcatattttttctgttatggttagtttttattaatgattcaaattctgatctttttttattactattacttttattattattattgttgttgttattgttattgtaagaatagtcttctttaatatacattattctagcaccagttttcaaattcatttgagatctacttcttctaaataaattcaaacttttatttctcatttgattctctgaagaatacttataaaaatgaataaatttagatattaaattagatccaacataagaaacagttgagatagatccaacaactataaaaattattgagactaaaatcaattgtgctcttctcctatgtcttggatgtgatatcggcgatttaatgagcgttaacaaatgttgtaatagaatcctaatatatgttttactattaacatctcctatctttaaaccaatgcaattttggtgtatttcaattaaaatgcttttaattctttgttttacatttagttcatccatactgttcttattctattttttttttatattagtagccgttgctcgatataaatttcaaaaaataatataaacctcaaagataatgcagatggtatattctttctaccatttttagcagatgtcttcttctgttttcatactatatatatatatatgtccttcttttatacccgacattgtgtcatttattttccatttatggcaacaacaatagaaaggacaaacaaactccgaactttatataataatatataaacattctctatcgtcatcttcatcttattatatcaattataattgcacagataatgtgttttcttatcctttattgtactattgtaatatccccaccaatgtgtcagtccctgttctatttgtccattgttctatatgcaacatcaatactcttctccccttttctttttcttcttttttgtctcccccccccttttttttttctatttctcttaatcatttatcattaagaaaagaaatggatgtgacaaatagtgtaaaggaagaaatgaactctataaacagagaaggtaagattatggtgtggaagaagaagaagaagaagaaggcagcatgaggttcttaccttcaacgaaagctaaaaataaagtctttctgaataactttaaatccttatgcaaaaagtaagaaatcatttttcacttcaacctaattatcattttgtgataatattaatattttaaggcccaagcatatacacaagatataagtacaatatagagtaaatctatttattcctcagtttttatatttcaaattacttctagcatttaaaaaaaaaatcaaattctgtttcttattttttttcccatgttcgattctttttcgaaaccttttctatcaaaaaaatatcgttattatttaacaaattctcatttgaaccatcaatcgaattttattctataatgttccattatattcttgaattttcctttttttttcttttgtttttcttcaatgtgagtcatttgatatatgcaagatcaatctttaaaatttgtatttaaatattggatcttactttttacttttttttttttttattcttgttcgtttttccatcttctttctaattctttttagaaacgaactaaaatttaggatagtaccaataataaaacagcaactcagaaaagaacatacattccaaaacttaaactaactttttttcataagtgatgactatcgaccaagatccaatcaaaaagaattcacctgtcaacaagtattctacatcattattacatgatggtccatcatttgatagaccattaatggaaactctagacccaattcaattcaaattaaaaaacagtgatattgttgccactgcattcccaatctttcattattcctgtattccaaaaaaattgttatctttgatgcatgaggaattcaatgcagagatcgaaagaggtgacacgtatcctcaattggatcctttgactcttgatgagttttgtcattattgggttcattcgatgtgtgttattctattacaaaccgacaatcttaacattttacaagaagatgaatcttgttaaattgaagactggaatgaattgtttttgggtactttttatattaaaccaaactatatgccacgttgttcgcatatctgtaatgctggtttcttagtcaattcttctcaaagaggaaaaaagattggataccggttagcccaggtttatttgaaatgggcacccttacttggttataaatattctgtttataaccttgtctttgagactaatgtcggaagctggaaaatatgggatcacttcaagttcgatagaattggactcgttcccaaggcaggtatacttaagggccacaaagaacctgtcaatgctatcatttttggtaaagatttaactaaggtggaacctgaattatttgacgactttcaattgatttaaaaggatatattaattctacaagaaaggaatgtaattcgccttttctgcatttttttttttatttttagttttaatttccaattctaatcgtctaccatttttcatagttacagcagcgtaacacacagacagcatttactcacatgttaaacttttgtcaagttttatttattctatatacgtttatatactagcattatcatatagtaataatattcggcctgtgtatgtaaaagaaacataacaggataataatctattttaatttaaccttttttttatatagttgtttgacttttagtcaagatatctttacacttctatttaatctggcaccaaccaatcctttatgtcactgtcaatcacctttctcccctttctaatttgagtcttgtatgacttcctttctatttctcttttctttttttttttttttttttaattcttgtgatgctatgaattttctctaatgtgagaaaatgagttgaaataaaatgaaacaaaaaaaacaaaaaacaaaaaacaaaaaatagaatataggcaagttcaatttaacacgggataatcttcacttcgagacgtttttctttttctttttctttttttttttttttttgtttatcccacacgttgaatctccttctttcaatatatggtatgataaacatatatttgtttgatgctcaattcctttaaataaaactaatgccatcccccattttttggtctttcctcattcaatttgctttaactttcattatactagcttattcagttcacctttgacagtacgagataaggaacaattaagtactgttgcaagtctaggttatgggtgttgcagatttaattaagaaatttgaaaatattgccaaagagacttctcaagaagtctcttctagtgcatctagatttggattggctaaaaaggaagttgaaaaggaaacaattgaaaaggaggaaaattcagatttagcggaaactcctctacaagaagaagaaaagcaagaagacaagattgatgaaaaagtttctgtagaagaatcatctgttgaaaaaaatgacacttcaacagaaaatcaagagcaaaatcaagatgtaacccaagaagttccagttgaagaagagtcaagacaagtatcggaagatgatgaacaaaagaaagaggaacaatcagaacaagtcgaacctgctcaacaatcaactgaaggtcacagtcaaattgaaagagaagaaaaagaagagcaaaatcaaatggaagaaaaagaccaacaacaagaaagtgagaaaaacactgctgaatcgacttcttcgaagaataaaaagaagaagaagaaaaacaaaaagaagaagaagaataacaatagcaacaatgatagtgacgttgctacgaacaatgttacagctaatgataatgatgataacaataatagtattgtggacaatttggaagttgtggaagatcctggacttaggcatctctaactacgagactgatgagatagaagccatgacacaagaggctaaagaagaagtttttgatgaactagcccatgaaaggcaacagaatgaaatagatgacgtaaagcagtcgaaaactgataactcaagactaggccgtgatgaaccctttgaatttgggaagcgtgctttaactgacgaatcagatgtatgggatcataatgcttgggataatgttgattggggtgaagagcaaattgaagaagccatgaaaaaaattgaagaacaaaaatcacatcctgtatcagattttgataaaaaattgtataacggcaatccagctaggtattgggatattttttataaaaataatagagaaaatttcttcaaagatagaaaatggttacaaattgaatttccaatcctttacaattcaactaggaaaaattatgggcccgtaacaatatttgaaattggctgtggggcaggtaatacttttttcccgatattagagaacaatgaaaatgaagaattgacattggttggtgcagactatgctccaaaggctgtcaatttagttaagaattcagaaaaattcgatccaaagtacggaacagttagtgtatgggatttagcaaatccagatggagtattaccagatggaatacaaccacattcagtagatattgcagttatgatttttgtttttagtgcattatctccatctgaatgggatattgctatggagaatttgcgtaagatcatgaaacccggtggtaagatattattccgtgagtattcatttggtgatatggcacaaattagattcaagaagaataggtttatggaagataacttttatgttagaggtgatggtactagagtctatttctttaaagaagaagaattaagagaaatatttaccaagaagaactactttgttgaaaataaaattgctgttgacagacgtcttcttgttaatagaaagagaaaacttaagatgtaccgttgctggattcaagctatttttgatgttccaaaatagtgctataattaaatagttagaaaagcaagtaaaattaaagaaaaaaaaacaaaaaagattatctgcactgaaagcatcattattgttgtatatattacgtttctttgatatatttatctacttatttatatacccacacacttaatatgtatctttattgtgtcttgattagcattaaatgtaattttgtaaaaacacaataattataagtcatttaatctatctaattatacctatattatattatgtattgtttttaagagtgcctgtattgaactattttgtgaagaactaatcttattctttgcatgtaaattcgtcttttttttgttgattttgaaaatcttaaatatacacataatatttttgtaaaaagcatgactcaactataaaaaacaataaataaaaaaaatagagtaaatagttgaaaacattttgattgagctttattcaaagggcatattaaatttttacgtataattttggatagtcatactatttttaatggctgaaacttgtaaaatcatattaaatgaaattatcatctacattaaagatggtttctagaacatacgatgatgccataaatgcgttaaattctttgcaatcgaattatgccaatattatggcaattcgtgaagctggaattagaaaaaatgaaatgagtatattagaaatgaaggaatgggttaggagaattggatatacccctactgatttcaataaattaaacgtggtgcatattacaggtaccaaggggaaagggtctacggctgcatttacatcatctatccttcaaaagtatcatgaaaaacttccaaaagttggtctatatacatcaccacatttaagaacagttagagaaagaattagaataaacggtgagccaatatctgaggacaaatttacaaagtattttttcgatatttggaatcgacttgattcaactagttcatccttagaaaaatttccacatatggtactaggcagtaaaccaggatattttaagtaccttaccttattgtcatttcatacttttatgcaagagggctgtgatagctgtgtatatgaggtgggtattgggggtgaatatgatagcactaacattattgaaaaaccaatatcttgtggtgtatctttgttgggtattgaccatacatacttgttaggagatactattaatgaaatagcgtggaataagggtggtatttttaaaaatggaataccagcttttacagtatgtgatcaaccaccaaagggtttagaaattttaaagcaaagggcatcagaaagaaatacagacttgaaggaagtgccagtttttgaagagttgaaccatatcccattgggtattgctggtgaatttcaaaagtctaatgcatctcttgctgtctgtttagctgtacaaactctgaagtctttaaacattataaatgataaagttccacttcataaagaatcaagattaccggctaaaataattgagggattgaaagatacaaattgggaaggccgttgccaaactattaaaaaaggtcgtaatacatggtatattgatggtgcacatacaatagatagtatctcagcagcatctagatggtatagaagtattgctctgaaatcaaaaaacaaacaaatattattatttaatcagcagactcgtgatgcatcaaaattattagagaatcttcgttatactcttggagaagatatagattttgaccttgcaatattttctacaaatgtgacatgggaaagtggaagttatagtgcagacttggtatcaatgaacacctcaaaagaagaagttgaaaatttgtcagtgcaacaagctttagtaaatgaatggaaaaaacttacaggcagtaacagggcaatcgtaacatctagtatcgaaactgctgtaaaaaaaattgagacattttctgaagagccattggatatttatgtaacgggttctctacatttagttggaggtcttttagttgtttttgataagactgcttctgtgtaagtgtgcctcctttttgaaatgattaattgtattttacatatattttaaactaaaaacaaaaaatagaaaactcatagttgaataaataaagaactatatacatacatatctacctatttatatatagatatatagattcacatagattcacatagatttagttaatattatattattaaaactctaaggacggtgtatctgaaacatcttttccaaaccataccaaccaaacttttgaatatttaaggaagagtggagatccttctttatggtaagcttcaattgcgtttattgagctttgaatatccatataaaatattgagatacaaagttttctggataccactggaacaacactaattattttaccaaattttgaaaaatcgttaataatatcacatacatttaaagggtataaagggatattaagttctttgcaatgtgaagatttttttaatttatcggaatatttttttaaaactaatgaacgactaacttcttcaccgttgtataatttgaaatttggtattgatttttcagaataatgatataatgaccactggggctctaaatgcactccatttattttaaaatgagacctacaaccatatctcatgaaagcttctgcacccatcctattcttaaattcaatttgaacttcctttaaagtccctctcttatcattattgtgaatcactctaattcgttttaatggtcctccaacaatttgagaaattatacttgttataccagtatcattagggatattttgaaaacatattctagtattcagatcgttactacactctctgatagagtcataggtattattaaatatatgattgaatatttccgcttccgcatgaatactaccagtttgagcaattgcatgtgcatttaagttaaaaactagtttatcttggtttttttgataatttggtacatctttatccaagcatgtaaaatgttttatgctatgaaatgttggaagatcagtgagctttttacctgtctttaattgtggttgatctctattattgaaagcagtattattcttggcagatcgtagtaaaccaaatagccttctgaaagttctctcccttccagtagaatgtatacggagggatttgtttgcttttgagctggttaattgggtataaggattttcattaaaaatatcgactctttggaagttatccatgcttatttaaattaagtaactttgctttttttttggttctcgtttaaaaaatgtctttttgaacaaaatgaaaaaaaatagtaattatgatttcccacatatccaactgtgcgtctctgctttttatatcttaagaaaacactatacatgtttgtatcaaaatttttgacaaggtttttgcttaaatgccattaaataacatattatagcaataaattaccatttatattattcttgctattattttttatcattattaacaacaattttttaatattcttaaaaaaataaaattgaacacgctgaataacacctaataatagtttggtacaataatcatgaggaaaattagaaatttttagacaatgatttacaatattttgttttaacagtacaatttttttactactcactaatagaagatccataaaaaatctataaaaaaacactatcaactagtgattagcttgttacttctataaagttactaacaatatactatacatcatatttttccagtatagacatatacatatgcaatctataaactgtctaaaaaaaatatcagatttatatcatatttttacatcacacatgtccccacgacgtgaagtttctagtttcataagttcacgaagtgccattgtagcatatgctgatacacctaattgaaattttaatacaacagcagtcttttcaccacctttatctggattatatctttcaagcttggtcttcatgtatttttgaccactttccatagctctagtattgtttaatatctccagatcagtgttaaccaactgttgagtgggctcgctataatgaataattttatattccagttcctttggcttttgaagcaaatgtctataagagcctgccattgaaaaatcacggacttttcttctcatatcaaatggatccatgttatcttttttcattagatcgatataagattgttttaattcttcattatttgggtacaagacatcaaaacctggtgtaggtaagacaacatcatcaatagaatattcacctgaatcgatatcttcctgtgtcaaaaccttagcacgaataaactcagcttctcttatatcttcattaaaatcaacttcataatcatcttcattcataataatcctagtatcattctttgtatcgataactaggtcaccagggactaatttcaagccaaacaagctaattcttttactagccatagaattccaaacataactttgataagcatgaacgtacatggttcttaagtttcttggaattttcataatagcactataatatgctgttgtagaataattaccattttcctcctttctttgatttgataagaaaaaaagaatggcattttctgcaatacactgtcttggcatctttttcaaagctgaagatgcatcctttgtttctttccaaatttgtcttgcttctttagattttggtaagacattatcttgatcagatagaattaattcaacagccccttcccaattaccagcaagaagttctttaccaactgtatgtgtagaaatactaaaagtaccaaatcgttgcataccaaaataattgataaatccatttttagtcaatgactcacaacctttttgaagggtttcttccagagttaaatttgcacctgaatcaaaagtgacatctctaattacaatgataaattcattaccacctagatcacctaaacttaaaatagaatcctcatacttaaagttacccacaaccatgccttttaaagtcttatttaaagcattaattctgtcaactcttaatttagatacacacattctttgacaagtaacccctctcctatctttagtaccagcaaacctcattaattttgttggaactcttaaaagtttacaaataacattaactgcatccatagtatccttattttctttatatagagtgaaatataagaaatccttcgatggtccatatccccaattttcaacaccattctcatctttggtttgttcaataagttcttctttacttacacgagaattcctggagtttctagcaatcttaaaagtattctgttcagtggtgacagactctagctcattattaaaagccttacgaagtaattgatgaatctctgtcctcacacttttatcagcaaaggactttacagattccatttttgttgcatgacgataaacatcttcaattttggcaacatcatcttcaccaaaaatatcaaccaattgctttcttaagtgtgattcaacaacaaaattttgtctctttgagatttcttcatccttttttgctttaatctcttctttagataattctttcttctttggcatcttaaaacctttatctgttaaatgtacaacatcaccatttttattaatttcgttaaccataaaatcagtatacctttgctttatctgtcctttaaatcctggtaaatcagaagataaaaataaagcaatccctacatcttgttctgtgatatctgtcacatccactgcgattgaagaaactttagattttttgttattcgattctgccgcaattgttgcctcttcaatatgccttttaatttgttcagacatttttaaatgtatatgtttgagcacttatacctattgtaaactaatagtaggaggttacttagataaagacatcttattaaaactcgtatagcagtgatccgacatgagatgacttcctttcattttattaaaacatttcttgtttcagcgattccaaaaattttcttcaaagaaaagaaagatatagagacacccagacacatgcatcaaaatttgaacggtgtacacagagtgtactacatacatctaaaataaagtcattgtgaaacagcttaataagatgcagtgaaaagtcatttattatcaaagaaacgactacttatattggtattccttttaaaaaaaacaacaatagaaacataaacagtgctcgattaccttttttccttcctttttacatacacaagaacaattaattttagataacttttattataattaacattatgatcccacctcctcaagagattacaaccattccaaagaagataaaaagtgttgatgaattaataattaaatgtcaatgttgggtaacaaacaaggaggatggtgagagactagcagaaattttgtctatcaataccagaagagaccccccaagattctacgttcattatattaattacaataaacgtctagacgaatggataacaggtgaaagaatcaatttggataaagatatattgtatccagttcccaaagaacctactttagataatataaaaaataaacgattaaagaagaagaaacagactactccagttgtgttagaaagtagtgttgaattaaaacataaaggatctgaagtttctgtttcacctgaatctactgatataatggacttagataatttaaatgtgcaaggtcttaaaaataataatttgtcgcatgaagatgaaattaaaaaattaagaacatccggttcaatgacacagaaccctcatgaagtggcaagagttagaaatttaaataaaataatttttggccaatatgagattgaaccttggtatttttctccatatcctatagaattaactgatgctgaccaaatatatatagatgattttactttgcaatattttgcatccaagaaacaatatgaaagatataggaaaaaatgtactttacgtcatccacctggcaatgagatctaccgagatgataatatatcattctttgaaatagatggtagaaaacaaagaacttggtgtagaaatctatgtctattatcaaaattgtttttagatcataaaaccttatattatgatgttgacccatttttattttattgtatgactaaaagagataaattgggccatcatttagtaggatatttctctaaggaaaaggaatctgctgatggatataatctagcttgtattttaacattaccacaatatcaaagaatggggtatggtagattattaattgaattctcttacgaattatcaaagaaggagggcaaagtaggatcacctgaaaaaccattatctgatttaggtttattatcatacagagcatattggtctgatgtattgataaaactactggtagaacatggtaaagaaattactatagatgaaattagttccctgacatcgatgaacactacagatattcttcatactgctaagactttgaatattttaaggtattataaaggccaacatataatatttttgaatgatgacattttaaaaagatatgaaattttgcaaaagaaaaaaagaaatcatattgatccaaccaaattgaaatggaaagtaccagtgtttacagcatcacaactgagatttgcctggtaatttaataaagtatcaatatagtttcttttagtcctccctcatacaccatccaatttttatattagtgttcattattattcaaatcgagtctaatttgctttttgtaaatgtatgagtcaatgtaatcaaaatccactcatttacactctcactgtacaagaatatatatttaaatgtatatgtatatatgtgcatgtataaattgaggtgtttgtaataattaaaactatattcttgaaataatgtttttgtttcctttttgtttcttccgactctttccctgtagacgtttcaaccaactatttccaattcaacgttcccacaatcaaatttatctctgttagagtagtaaattcttttcaattcatcaacgtagagtttatggtaatgatcaattatagtttgatttggatgatcatatctttctttgatatatattggtttcccaacgacaatatccaagggggttctaaatggaatcaaaccaaaatcataattaaacaagcccctagcgaagaaaataggtatggtaaaacctactttttgtttgacccaaatctgaaatttattcaaaacagaccccttttcagtctcatagactctaaaacatttggtttcaccaaacccaaacacgggaaccaaactgacattacctgtctgtaaagccaatttaataaaaccttttcttttatttagaatcagttcaatggaatcagtagagcctaataatgactctctaacgcctccaaccacaatacatatggattggttagtgtccagcaccttcaaagcatttttcttagacacagatgttatccctaggatcatcaaataatctctatataatggactttgaaattgtgtaacgatagttagtaaagacacagggatcccaggaaatagttttgaccaaccacagccctcggtagcaaaagtagcaaaggcaccaagagcacctattccatgaggatgataaccgaagatataacgaggccccgtagcggagaatcttttctttggatcaataaaagtgggaatcaaattgcaggatttatgtaatttcagagggaaatagtcgcataaataagtccatatgggcagtgatctaaaccagggggaatatcttttatatatattaccgttagcaggagtcctgtcaaaaacataataaatgaaatacggtattagtaagacccaaaaaatggggaaggacagtaagaaaagagtcagaataatgaaaccaggtattgtagatatatggaatgcaatagccaaagtttgtaatcttctttgaaacggagtagccggggaacaacatgattccaggactggtttattacatgatactgaacctgatgtctcttcagagatagaagtttccacttgattagtagtatccttaatttcttgaatcatatcattatctattataataatcttttcatttgtaaccgaaccatctatttgattattattttgatcgcaatcactactagtagtatttatactactattaccactattattattattattattattattattattattattgttattatttaatgttgtagtgttcgaaatgatagtatcattactacaactattactattactatttttattatttgattgatcatttgtttgacctctaaatctaagtggagaatctgactcatttactttatagtctaatgccatatctctttctaacccttatttacttatttattcactcactcactcactcacttatttacttacttacttatttatttatttattttttccctttatttattattgtcctttaaaaatgataaaaataacaaataaacattactaaaatcaaacaaataaaaaaggaaactataaaaagtagtcttatcaacttattttagtttatcctgatttccctttattattaataatttatattttagtaattatattatttaactttctttaagaaaactatccttttctagggccataagtgctttgactatacttaattcacttgctattagtaactgccattactcttattattatttcttattattgttattattatttacagacgttactaatttgacagtactgtcagtttcgcaagaaataaaaaaagcaaaaaaaaaaacaaaaagcaaaaagcaaaaaaaacaaaaaaaggagatggacctgtacacccacacattcctaaaagagaaacttccaagatgttttacgcaaattttgtgcttgctttatttttttgttctatgtagattatattacatcatattgtaattgtaattgtaattatgattttatatggagaaaagagccatagacataatctaattcaaaatatatatatacatatatttgaacataaatgtctgtacatggtatatccatttcgtagtttttagtagctttttttcctttctcttcctaatcggtcgatcgttccttcattcctggaaaaagatagatgttacgattcttacaattttgattcgtcaacagcaagagactaaatacgaaacacgctctgaacttaaatcatataattatccttgtgttaatatgagaatgttggataattcttcttgtttcacttcttctttgtttgtttgagttgcacgaataatgtactggctgtagaatctaaattgaggaatactgttattatcttactacatcaacatatgaatatacgaacagaaatatgcattacattactctaccataagacgttaccacgaaactttctgccatttcttcgaagcaaaaaaaaaaaaaatccggtttcgctgtaagaacgaaattaaaacgaagcaaataaaatcagaaaagataaaatgaaaaaagaaaaaagaaaaaagaaaaaaaaatcacatgaccgtaaccttatttacacaatttcgcttcaatggaaaatcattttacccattttgtccttaatctattcaaatttgtaggacaaatgaaaaaaaaaaaataaatccacggaatttttaatttggaaaaacattaaaagaaaaaaaaaagattagagagattttttattttcttttctcttcttatctttttttttagtggcagcgtttaagatttttttcttattaattttcctttctttgtttatttccttggggctttgagctggaatttatttatttgatccatctattgtcttatggattattctcttatgcacatttcctattttttgttttattttcctttttttatttttttcctttttttatttttttattttcgcgtatctcaattgttttatcctttttcattctttttaccaaataagaaagcagaacaataaaatctttattttcgtttttgatcttcgaacatttctgtgacaattcgagtcaaacaaatctttaaaatcaccaccaacattgggtccttctctctaaggaatagtgatagaagagggggatatcggtggaaaagagttggaaacaatgccaaataatacatggacaaataaacatctcaccctcctctcaccttccatttccttgtcttccttcccactttatttcaaagatatatataaatggtatcttatacttatagcatatacctaaatctccttccttgccttcaagtgacttttgttcttcgatgtattcacctcttccttcttgtcttcttcttcttgaatttttatcacattttcgatatttggtaaaatatacacaggtccaattgaccgaagagaatatataataatttactttttcatattatattatattacattgcattatatttatatttatatttacatttttttttattttattgagaaaaaatgactaagaaaacctggaataagaaaccttctaataaattaacaagagtcatttcatgttcatttgttattataggtctgctttgttttttattgtatacgtggaatgactatatagagaccacggccgtgtttggtaataaagctaacaaactttcagttccttcacaaaatgaaaatgctaatcaagagacaatatccattactgacagaatagagtctagaactcgtatcactaccacaattaaacctacagttaccacaccttcatctccaacaacttataataatgaggctcaagaaaattatttgaaagttaaagaacaaatctcttcaatgagaaagaaaatagaagttgaaactacttcaatgaaaaagtctacaacaaatagtaataaccatgtatcatcttattctctagatgccaccagcaaaggttcttttaacccaatgaaagctttacatcagatattgaatacctccccagttgtcctatttatcgatgctacctcgatgggtgacgaattaaataagagcaatttgttgaaaaatatacttttaaataattatgaaatttctcccgaacttgttattgtggatcttaataaacatacaaatggtaatctactacaagactatatcaaagcttataaattaaacgatgatgatgatactcaacttccttatcttttcataaattcaagaagtgttttaaacaagacttataagcaacatttattggaatatcatgcatcgaacaagcttctaaatagatttaaaaagtttgctgagggtaaagttatatttgataaattggaattgccttcaaactcctaagttgtttctttacgatcaacatcatgtattcaattaatttacacatataaattatatatatatatatatatacgtatgcatccttatatagtatagatacattcatttccaatatattctaataccatatttattacttttatttttaatttttttttagttaatcgctacctttcttctcttttgttttccacttaatgcttaataaatgatatcattaatcaaaaaaatacactatattataataacaaaaaaaagttcataagacatacaaacgtacatatatacgtatatatctacattgatttatatagataaaaaaccttattttacaaataatctattcattgcagtttaaatgttttggaaaacaacacctggattacctggaatagcattctcaatagctctttgagaagcttgtggtaattcaacttcagcacctgtgaaaatatccttaccagcgttactaccgttagggaaactgatcgcaacgaattcttcaacgttcaaagtttgaccagctgtcttaatcttatctaatgcggccttaactacatcaacttcgttgaattgtagttctctgtggaaaacagcctctgggtcttcagtagctaaacgttgctttaataaagtaacaaatggcatagctctcttcatctcctttggttcaatcttttctcttatcttcttattgtcatcaagagtttgattagcaaacatttcagaaacaatttgaataactttatcttgccattctgggaaggattcagatattaataaggttaatcttactggcttactagcatcgacatcagagcctttacccttcttcttctttaaggcttggccttctgcttctctaatacttctttgcaaagatctgacatagtccaaagatgaaagaattgaattgtcaaccggtttagtggcacgtgggaatgaagcattttgtacagatccctccttctttaagacttcacggtagatataatcacagaagtgtggtgcaattggagccaataataaaacttgagtctcgatgtaacgtaagactaaatctttgtgcatggtagtacatgcatcacggtagtaatctctagcagcttggaaatcgaacaaaccatatttcaaagcattcttgtagttggttaacgaatattggtgataggtcttctcgatcaaactattcatttcatattcataagcaatatcgaagaattcagtaattggaccagttcttaaactagaggcatccttaacaatattttcagcccattcctttaaagtgtacaatcttaaaatagctgcattagcattagattcgtcaaagttggcatcttcgatagtatcaccagcatcagctaaagcaatacgagaagcatcagcaccgaatttctcaactgtttgttctaaggtcatgaaattaccggtagacttagacatcttagcattgttcaacattaagtgaccattggctctaataccctttggccagaacttcttagggaatagagcaacatgtgtgtaaataaagaatgttaaatggtttggaatcaaatctttaccagaaatagagacatctaatggatagaagtattcaaattctcttcttaagatttgtagggatcttaatggaacatcaatgttttcagtgttgtcactgtgttggaagatgtagtcaaaaaattcgttatttaattgttctggcttaatacctaaaggaccaacttctttaccatagtagtccttaaataacaaatgagaaatggtgtaaaatgcttggtaaatagtagaatcagataaagattcaactaaatattttggatcccatggcaacttagtacctagaccataggtacgagaaacagcccaattcttcaaccagtcaagaacaccttcaaaggcattcttaacttctggagcaaaaagttccataccttccagacattcaaaaacttgctctttccaagattcttcaccataatcaatgtaccattgatcttccaaagagacgatacattcatctccagaacgagatataacttgagattctggttcattgtaaacaaaggcttcaccagcagcaatcatatcagctttgaccttgtttttagcatcttcaaccttttcacccttataatcaccatagatcatagtaccagagtagaaatcctctttatatgctaatttcttagctgtaagtaataagttggtatcctttggagattggatcttcatttcttcacataatttcttagcagttaaatcaccgtacttttctgtatgaataataggaataactttttcaaggtcaacaacccattctgggttaataccataatattcagatttatttattaaatctttagtggtcatccagtcatctggggaattacttgggacacaagtaacaacaccagtacctttagttgcaataacggtttccataggtaaaattcttaattcagagaatacagactttggtgcatggatctttgtaccaataaaatgtttacctaagacggtaactactggtttgtagtaacctctctttggagttaatttctggtaagacatattcttgaaggcgcgctcagttgtgatgtaataagagtcaccagcgtcaaaaataccatattcaatctttggagaaacgaaacaacatgtttgaccatacatggtttccggtcttaaagtagccgcaacaaaatagaatttcttagagtgatctaattcagttacttcttcaataatcttcttggcttctggagcaaattcagtggcttcaatcttaataccaacatattcttgtggagtaacaccttcaccggaggctctgtcatggtccatacatgcttgaccatccttttcagaatagacggtataacgttcaccaaacttaatcttacctgcttccttcattctgatcatttgccatctgatgaaagcatcataatatggattaccatcagtggtaatataagaacgtctccaatcaatacgtgcaccaaaactggtacaatccttttgacataaaggtgggaagtaacttaaccaatattgagcatcagcaaatttgtaaacttcttcccttggaatacctaattgtaacataatttcaaattggtatttaccacgaccttttttggcttgagctttggatttctttgccttgaatctagtaacatcttcagattcttctttcttttcctctttaacttcttcttcttcatcttcctttggaacattcataaaatctttaccaaacatttcagcttctctctttaatttatctgcacaagctaaaattggcataccagtacaatggaaacctagtggaaataaagctctcttcccattcattctttcgaaaccaatagaaaattcgactttggataaagtgaaacaatgaccggcatgtaaaacaccgttcatgtatggataagccatagaggacataaattttgggtacttcttttgtaattcctcagaatccatagtgattggttcatcatcaatagatggagcgtctaattcaaattgatgctcttcagcccagagcttctggtacttcttttcaattgcaataagagcatctctacgtgcagtgttttccaagactaacctggtcgacattccgttatatccttagataatttgttggattttattctttccttagagtctattacggtgttctttattctcggaatacaaaaaaatatatatagattaatcctattcaagaatcgacaagaagtcagaaaatgaaaaattcaagtaacaatttaagtaaggtcttagaggaataaccaagagtgttgtgaattaacaccagatcattatgtcgacttaagacactaataatatatcaagcattaatcatatatctgaattgtgatttttcatagagagattgtgaatttcttttttttttgttttttctttttttctctctttcttcctttttgtcgaaaactttttgcagagatgagaaaaaattttttttataatttcttttcagccggaaacggctttcttctgcttttcttctgtgaagagatacatacaccatgtgatgtactctcaagaaagaggaatcaaaagaaaaaaacatataaagatatatggaatgattacaagggtccactaactcctccttttttggatatcaatgttttaggaatgtgccatacaacaatctaaaattactgattttcttttttcttttttctttttttttttttcagtttataaggtataataatagtaataataacaatgacttgttaatagacaatagaagggtattctaaagtaaaagaaaacttaacttatgatatctataaagttgcctacagttaacaattatacacaaatcagatatatacgtacatatttctacacttgtgtgtgttaataaacatataataataaaagaaaaaacctactacttaataatattgtttttttttttcatttatttgttctatcatatctgaaatccacgatcgttcagttgatgaatagtccatatccatgtggttgcagcatcatctaaattattagctatactactgctcttagattctacaccacctgtagtaaaatatttaccattgtcgctttcgttgtctaattctgtagacatagcacatcttaaagttccaatagatccttgctcattagtaacaccaaagaaaaaattgattacttgaaacaacatccagaagaatattcctacaactggtaatcttgtccaataactaaataagtttgtattcattactaaacctggatgcaaggatgcacataatacgtctgggttctttatagctaacatttttgaaaattgaattaatgcagtctttgaaactgcataccgaaaccatgtaaagaccatgtttggaaaataattgaattgttcactcaaacaccaatatttgtactgtagaaaatgtccgagagatgataatgttattatacgtccatgacatgctttaaccaaaggtaataatttcattgtaaacaaaaaatgggatatataattaacctgtagttgaatttcaaatccatctattgtggtttcaaatggtattgccataatgcctgcattattgatcaacacatccacctgcttctccaatttaatcaattttgcacacgcacgctctgtgcatcttaaatctctaagatctaaatggatataatgcaacgaaccaaacttacttatatcgtaacaatttattattccattcttctgctttcttctatatctcactttagcttcctctataatatctttaatagtcttatttactcgttgagaatttctgccacataaatatacactaaaaccatgaatgtaaagatgtaaacatgtgtagtaacctattcctccagtgccacctgtaattacagcaacttttctttcactgataggatcgtaatatggtaaagtatctggatcaaacatataaaataattataataaataaatgaaagaagatatcataaaaaaaaagattacaaattcaacagctttttagattctctgatattaatatacaaatcatctagcaatatcaccactcaaaaagctttaaagatttataacgaatatctttaacaaataatattatctcttctgacattcaactatttgtaaatgtcatcaggttcgaataatctaaaatcgatttattttttttttattgtttttttttttatttttttacttacaaaaatatttttgccgctaccaaaatacctgaaacaacatctacatataaatatattttaatacaaaaaaactaaaaatcccctcgagaacaaaaagaatggcaaatactgcaagtatcttctacaggcttcaagttatatgccacacagaacattagaacaaaaatttcgtggaaagattataagagaaatctacatacaattgttaactaaccctaattaacgaaatatatattccgttgctcaattctttcttttttttcaagtcaaaaatgaattatgaagatatattatttggtttacaaccaataatcaatgcagagtcaataaaagatgttccagtggaagatgtttacctacaaagttatatcaccgtcatggatcaattagcagtgtcgttaaggtctccacaaaacagagatattgtgagagaaactggtctcttaacacagatatcaagagtccttgaagatatactagatactgctgtccatgaacctgaaaatattaataatataaaatattggaaattagcatccgaattaataagatgtatagcaaattgtcttgttgataatgataaaaataggcaacttctattaaaaatatctgattcatcctcgaacactatacagaatgttaaaaacaaactactagattactacctagtgaagattttaaatatgatagagttgccaaatgatgataatgatatcctaaaaaatttacaatttagatcaattgtgttattacgaaatttaatacttcaaaataatgattatactttaaatattggtaaaatgttcttaggtcctgttctaaattatttacataatagtgaacatacattccaagaagaaacggataacacggtcttagcaactgatttaatccttgactttttaaaagctaaatgcacatatcccttttttatagattcattactatttctatccacattttgtaaacgtgtcgcaactgtactagaaagtattccacaacaagaaaatgaaaatagtaataacgatgaaaaatccgcgaatataataaacaacgaaaatactatagagccaactgtagaagaaaagccttatgaggaagatccacaatcagaattattatttaacttatctgaaattcttgaaaatatcattttacgagaagatactactattgatttcacttcaaaacaaatttttatagtacaaaatgaattattaacaacggtaaaactattggatgataaattttttgctaacaaattaatcgttatgagaagacttgtttctatttctgggaatatatcaactataccaacaaataaaaatataacagaacgtgaaatttgttacaaaataataatggaatctaaatcttgttacatggttgctgctgctctgataattttgtcaaactctattaattctaaatctgatgtaaacgatatattaaaggaattaaccttatccaatattatagaagtggccaattacataaaagatccattagaataccaaggttatttagatattttgagaaaattaattaatattacaaatgctatattgttaacaaatgacgatgtggtaatgttgttttctacattagcaagttgttctaagcaaactcaatttttcccaagtttatctgacctcatggacagattactgaaaaagattattgttgtgttaccaagtgggtcgatagttcgcttacttgatcaaaaaaatggattaccacatcaagaagaaattattgatttccttactgatagagatagttttatctgttgtttggtaatggacaaattacttgtagccaggcaagagacatctcagacaatattgttaaaactttgggattcgatttttaaactgcaggatggaataaataataatcaaatggcaaatgataaaaatatttcaatagcctttttattccaattaaccaagaccattgggatttatttacgtaactgcatagcaaattcgtcaaaaaatcatgacttaaatgtaatatttactacacattttgcttcgtttagggaaataatgaagactattctacccttgagacacaattctgaaaaaggtagcgaaagtgttttcaataatggtaaatttatagcaggaatgatacaacaattacttactgataaacaaactaaaacaaatgaagaagctatactaaatgatttatccttagaatttttcacaagtgaaaactaaaaaataatctattctgctgttaaaaatatctaaataacttcctcccctactccaacttcacctacttacaccatataatgtttgtctacaaaaaatattttgaatactcaatataaatgtgaatcattttttgctatgtagaactgtttttcctgaacaatcataccgtcttttaaatcatttattctgtatagtaattgtctgaaaatttaatagttttactgaatttattccttcaaaaacatattaacaaaacacagtataaattatcaaagatccattagttcttttactgttatcatgcttctaatatgaaagaataaatattaccttacctatgcactgctaataatataatgcccatttctgtgttattctttgtgtatgtagaaaattagattttgataaagtatatagtattgttgaagatgtgagatatgatctcatttccatttctgatatctcttccactctattcaacgatctcaccaatacaaacaacaacgataaagttattcagttgttattcctatatatctctccatgtctcatcattgaagaattctgaaatatcacgaaatgcttattcacatattgtttttcaaaaatttggaaatcagaaaatctaaaaaaaaaaaaaaaattaatattgtaatcgcgaaaaatttcgttccataagatttcgtcatttttcattaagacaataccattttgaacctcattacatttttatcaacaaagatataatcaacactcgcattatttccaatgccaaaccctagataacctgtaacgcaatcacgaaaatccacaactgggttggaatttgtttgtttattttattcatatgactatcaagttgacagttaatatatatattatctaaatttttcatctcacagcatatgttgaaacccgaaaggtttcaaccttccgctgaaaagtttaaatggattctactaaaaacaaattttgagatttctatcgttttcttactgaagcttattttaaactttaaattcagtaaaatattacgaaaaaaataacaccaaccagggatttctgatattcaattgcgtaatatttgaaaaaaaaaatcaagcttctaagtttttaatttgactactttattgaactagcttctaacaagaaaatccaataccaaagtattaacttctttatagttgagccacataagtctcgtccgctcctttctttaactattttttatatataaatttaacttaactaaccctagtcgctcctttaatttttttctattatcaatacttttattttttttattattttcctggtttactacaaattacttacttacttttaaatatgatttttaaaaaagttgctattttatttgcatttggtgctactgctgtcaaaggtttgtattctaacaatactgctactcttacaactaactctaacatctttggcactacaaccattacaccagattattctgttgaaccggttgaaaatgtgtctacttacgctgattctactactactttttatgttaccaatacgatttacaagacttattattacactaaaaaccccattgtttctggtaccatgacttcttcttcgttctcaacaaatcatgaaactattgcttcaaccaatgctgctgtgaccaacgctccttcctttattgatagacaagttgcaaatgcttctccaactatgccattatataccaactctaccactgtaaacatcgaccacaccaccactaccatcacttctactctcttgaccacagtgattagttcaattcataacagtaacaccaacaataattctactttaagatgtgttccaaagactgaatatgttactataactgcttttccagaggttcaatatgttactgtcactgaagacgccaaaacatcatatgtaactattacaattcaacctactggtgcattctggtcaaattctactgttgttaactagataactagacgtcctgttatttggtatatatgcagcttgattgataaggagaaaaaatattgcaataaatgataatatctactttttattcttattataactttttattcttattataactttttattaccatagttttgcatatatcacacacatatatattttcaatacctaaaatggactcttcaaatgtaactattaaatcaaattttattgtttcatttacatctattttctctatagtttattttacgatatttctatgcatatatatatatatatatagacatctatatatgagcaatattgtagtttcaactatttaaatgtatctttttttattatgtattttcacttgttctgttgttttaatttaacgcaatcatcgaagcctttacaacgtttgtaaatatttttatggctgcattcttagtttcatcaaattgcaataacaaatccaaatcccttatcagcattttataaacatcattatacttcttcatttgaactaaagtgtgacataacaataatagacattgagctgaatgtaaagaatttttattttctcgtgtttcatttattagtttagcgagaataggtagtgctcttggacctctatctacattaataagtagttgacaaatttctatcacatatttgaaatgccaaaaattatcttgatataaagttaaacattgatcactaagatcgtttaaaagtcgtaaagattcatccaattcatcatttaatatcatttttttaattcgtaaaagatttaagtacatttcttggtcatactttaaggttggcaaatacatattattgacgattgaatcaatatttctcccattattcaataattcaaatccctttcgaatttctttatcaattggatccatttcataaaagagctcatagacatcacttatatctgtgtagcccaagtacctccaaattttagaataaaaataaaaaatggaattattgaaatcatcatctagaagactatatctatcttgttgcaacgatattattaaatattgtaaattagactctaaaagcttaattaaatttttattagacttaagacaaaataatgtgtcagctctatacgcaccttcaaatatttgagaattattttgaccatcaattctttgtaaactatctattatcttatttattctgtcacgtatagatataacttgttttggataatcttccatataccttaaaatggtcaaatgtatataatttaacgtttttatatctctattttctctagctatcttgaaagcttcttcaaaagaagccattggtgatttactatcaccaaaaatcgagtgaaataccccaagatgcaataaagatatatggaagtttttatctccattcctggctaaaatataatcataatatgaatgcaattcatataaagcatcttgataccttttttcattaatgtaaatgaaatactttaatatgtggatcgaggggaacattgtgatatcgttgagtgtcacgttttcaaaatacttatctatttcaccatgttgttgactttcatttttgtcttttccttgcactgctaattctatttggtaattgattatattctggaaatgagtatcagatagtattatacttgtatgtaattgatttgatgtttctacagacatagttttattaataagcgacttaaaagtatctatcatcaaatctttatcatcattcccatagtgataattatcagtattgctaatatccagatagacctgatttttaatattttttttatagtctgtttcaatgttggatataaaattatatttacaattgtcaatttctgttgaatacttaataatccattttgatttctttataaatgattttaagttgtataatagcaacaatctgtcatcaaaagttgaaagatcaagttttgtgctacacaatgagacaaaattacctaaataacttattcttttatcattatacctattcgataatatacactgcaaaataaataactggtcgattgttctaatagatattaaggatttacataaacacaagcatatatccaagttattgggtgatttatctatcaaatactctaaaatatcatctagactaggaaatagcggtacttgatccgatgattggaatacaatatgcttcttaattggattaaatggagttgattttagtacagaagaagagatcaatcttaaaaacaatcgtaaagaaacagattttggaacagatacatggaaatagattatgattaaaatgcaaacatcataaggtgtagggaccgtagattttatagtaaaatgtgttgccatttctttataaactttttctttaatatatgaaaataaaaagaaattaaaaaaaggataatgatgataactaataaataagcaacacttttaatcagaataattattcagttagttatgatctaattcttatacttattccttttatatcttaacaataccaaatagcaatttcaattaaccaacttgctattaatctttcttctaaataaatttgaccgcaagatcaagtttcctaatcgagtaattctaatcttaatgttgttgatttttaatataaatagattcacacacacacatatatatatacatcttcttacaaactggatatattaaccatgttttagtaaatattatactatatattatcacaaacaatgactattctaaatatctataagacgttaacactaaagcattcttgggtaatgatcctggaacaggcaataacaatttacatctttgtctcttttcattaacttctgttattaaagcaaagcccattactgacgattgtaatatttgctttggttcagttctcttaggacagtgatatatagtgataatagcatgttgtagatttggttgattcacttctacaggttgtaaagttaatgactttactgtgtctgctgacatatcattttcagtgttattattattaccgttattctgattattactaggtatagatgcatcccctacatttgctgagccattaaatgtgtcagatctgttattgacgggtaattcccatataattaaatctgtgaaatcacaactagtcacatagggtgttatgactgtgttcaaatcaccgtagaaataatctcttatggcaagacgttgtagcaatcttttgtatgcatcatcgttaggtataaccccagttaactttggtaacttaatcacagaacatttattcttatcaatgattttgtttattggctcagcatttattgtagtcgaaatgtcattattagtattggctgataaaataacaattatatctattttcatcttggaaataatcatatttaaaacactttcaaaactttcataagattcataaaaacatgatggtgtatcaataatacaaccagatctctgaactaaaggatcattatataatcttctgtcgacagtatccaacatctgtcttacagtatctacataccaatcaaaattatcttctatcttctcgaaaccaaaatttttgatcaaaggctgcctgctgtgtaatttagttgcaccacttgtcagggattcattccaaaagggagattgtaaatcaatcaaatcagatatcggtgtagccatgatacaacctggtggggaaacaattggttgttccgggtctaaattaataaacatcggttgatatgctttattcttgattgaataggacgaaagaattcttgataaagatgtttttccggtgttcttattccctaggattaaaactttaggccctgtaaatgatgaacatctcaatttttcaatggcaaaatgcaaattgtaaacatatttagcattatcgttgggagtaacattatttatgaatgggtcgtctaaaggtatcatcaaattgactagtctccatttgatacgagaatcttcaatagccagtacactaaaattccaatcttgaaaacaatattctacatcatttgctagttctgtacccagtacttcacaaataccagacagaacagtgatataaattttgacatgctgacctactagatcttgtttacctaattctaaagaccattgcataccaatagataaggtcaagtattgtggttcgtctttatttgccaattttacgtctccattatatatattaattggtccattaattggatcatttatactatctgaatctaaagataatgtatttcctgtatgacctggttccaaacctgggagtgacataatttgataattcttttttctaactaattgtatttttctccatacatgtataaataactaaatgaccaaatatgtattttttatatgtttatatataagattcacatttagtttgtttttaacatgtgatattcagtgatgttaaaaaatcacaagagagtgttctggcattataacttttagtatgtaatgctattgtctttgatattaaaattttgaggactgccaatctttcctaaagtagtaattttcggagattccttttctttgtgaaaaaataattaaaattaaaagaaacaaataaataaaactaagtactaataagttacaagactgaaaaaaaaaaacattaatatgccatagaacaagaagaaatatcataaacataatctccatttacgctggtgattgctgaatatcacttgttatttgatgaatagttttttttaagttggctttttatcaacctattcttaacctttttaatagaaactaaaacatacacgtttagatgcagcatcttcatagactttttgatctttgcttttacttttacttttgttttcaaattcctgactattgagttcatcgtctgtctcatcttctacatggaaaaaacccctcgttctcatcttcttcagtggaaaaaagaatcaatgtatttcttttcgcttgtaatttctcttgaccattaatatcctaaaacagtagtaagttactaacaacttcatcatcctgaaatgtgtaagtatttagagcaatgatttatccagcattaaatgctttattgataactatcagaaggaatacctctttagaatctaacaatactgcataatgttatttagttggactaaataaaataaaagagtgatccaccagatactggcattacaggaaaaatgaactaaatttttgttttttacaggagcaaaactataatattaaataaacccttacttcttcttccccacttaaaaggttttttttactatcataattatctaagtgagtttactaccattaagatctctcaacatgttaataggaactaactgattgtaaaccctaaatacagaaaattgtgttaaattttcattttgttattgtgaaaaaaaaagaaaaagagctattttcatgcgtgttgatttttttaaatcgtttatggtttaacagtttaatgtagacaaatcatttttaaaacttcttttatcattacccttattaaaaaatttgtccaaatcatcgacactttaatttatatataatagtatatacacattgcacagaaaaaaaatttttttaaattacgatattctcttgcagttctcctatttattgtaatgaatatttcaaagatatgtccttattgaatatataaaacttatcgcttcattcaatgtttttattttacatttttaatttgaaactccgcaaatctttgtcaatattaaaagaaggcaaatagaaagcacaaactaaatggaaaggaaataaaattaacctctatctagcaattcttgagatcatggagaatatatatacatatatatatatataagtacaaaatgctatattaataaaaggaagatgacatatacaaccttatttacaaatctttaataattaacgaagagtcatcaccatttcttagagcccattcagtccatgacccatcatacaatttaatatttttatagccagcatgttcgaaagcagtttttatgatagcaccagtgacaccggtaccgcacatggtatatatttgattattttctaaatctctttccacatcttctttactcttagtattaccattattcttacgaatagcttcaataataatatttttcatatcctttgaatcagttgggaattgtttggtcacaggatccaatacgtctacaaatggtaaagattgagctcctgggacatgaccagaagagagcccaggtcttggttctgaatccacacctttaaatctaccatttgatcttgcatcgaacagttgaattttaccatcgtggaaatgtttgctttgaactaattccatcatttcatcatacttgacaacttgttcctccgaaatgtctttattgatattataattgttggtaggtgtgtatggggagagtttatctactgaggacgtttcaattggaccatttaatttttgatattcagtgaaattatttaaaagatagacttcaggatggccaaacaatgctaaagtccaagcgcaacgaggactactaaaattacctattctgtcgtaaacgacaagaacatcattaggcaagacaccgaactgattcattgcttccgcgaatttgtgagctggtggtgccatatgaggatatggagattcggtgtctttgatgctgtcaatatcaaaaaagattgagcctgggattctttcctgagtcaaaaactcttctttagcgttacgattcgcatttggcaagtaccaagtggcgtcaactggtataattctttttgcagcaccaagttgttttgcttgttgggcttttaataatgtgataaattcttgtggagaaatcaacttgtataacacggacattgtttagaacagaattgtatatatatatgtatgtatagctaaatatctgtaatattaggtgattgtgcctttaaatttaattgactggtaaatatatattataaaataacacaaaacatgaacctaaaaaactctacacatacacacacactcaattactcactcatatctatatttatatatacatatatatccaactttataagcaatcattagtgagtcatgcactattttccgtgtatcctaacaataaaaatgataataataaaatttactactacaaaaaaattttccttcccgctttcctacagcaaaaagaaaaaaaaagaaaagaaaggattaaaaaaaacggaattcatcgagaaaaaaaattaaaaaaaattttttttgtaccgaaaaaaattgaaaaaagaaaagaaaataaagagaaaattggaagattcgaaatgatgagatgaggaaaatatgaaaaaataacaagagattatatttggtagaaataaatgtgtatgtatgtatgtatgtgtgtgtgtgtgtgtgtgtttcaatgcaaaacggataattacacattcttttttgagtgatcaaagataatgtgcaaagtgtatccacaaagatattgatatataagaataatgccattatccaagtcgttatcaaagatacataaaaacttacatatcaagaagaaagctacagggaaagacgttacaatacatccaaatggtcgaaaattcaaacaaattaatcgagccacattgagagaagcgaagttacaatcaaagaaaaaggaatttacagaaagaagatcgaatgaattagcacgtgttaagttcattcaagatttaataaatacactagatgaatataaaaactgtacaaaattcgacgcaaatgagatagctagttttattcaattatttataaatagagatgatgaagagattgaagaatttaaatccaaaagaagaccaaatagaccgccacataataaacaggtcttgttagaaaataagaaaaaactggaaatggaagaatttgataaaggtttccaaatacctgatttgactttagaagaaaatgttaaatttttaaggaattggaacggatcatttggagccatgtcaactttaaaattgattagagtcaattctaaaggtgagattgttatcaattaattaagtacatgtgtatatagaagggtaaaggaataataacgcattatatgtaggattttttaattttctttttgtctgtttttattttttattttttattttttcgttaaagaaaataaacagaggataaagaaagagaaaaaccgataaagaaagttatattatgtctatggaaccttttcacctcattgcagttaacaaatggaaaaagtgaaatgaacttaaagtgaagtctttatcctaattgttcttaaaaaacttagcctagattttgcttttttttattttcctttcattttttttgttggtttttaaaagtttacatatgcgtatcaatttagacaatatttatcctacacatgacggccttattctaaaattaaatgaaacatgtcctaaggaacaacagacaaaggatctgcaattaaataaagactattctaagttaatatatgtcaacaatgaaatacctgttggctatataaattgtgatttaatcaccaacagaaagtcagataatgggatatatgtttattccatagtattactgtccaattatcaagctgttactgatctaaatatttttaattatatattagattatatcattgatttggccaaaaccaatcatcaacgctatattactttatatttaccatgggattatgataccaaccccgtaaaatcatcctttaatgaagttgttagatggttcatagaccacggagacttcaaacctctatttgagaatagtttagaacccaatgaactagatgactgtagtggagctcaaaaaataattttaagaagacaattataagagataaaaatattaccctatccatatacacacacgcacacgcacacgcatatatatagttagttatattactaagcagccacaacatatacaaatgtatataccaccttcgattaataataatttcttccttatctctcacttctttttaactgcggtttccttctctttctgttcttctcttgcattttcatttcagtcaataatttcaattttcaattttcaatttttttttcttctttttttttacattttcttctgaaaaaagaaaaaaagtaagaaaatagaatttcatctttctttctttctttttattttacagactttttcaaatgttgagaaaagaaaaaaattttttattcttaattttcaatgacattttacataagctatacaagaggatctctgaatgattatgtcagggagatgaagaataccacaaggttataaactgtatcaaattccattattataattgaatttaagtgtctttgtctatgagaacagataattgagctttattaccttttttttttttttgaagttatacaaaaataaaaagagcaaaccaaaacaataaagaaaataaacaaatatatatatatataggtaaacagataaagataaagatacatacagccaaaaatgatgtctcacaatgttaataatatatcgaatatggctcaacaacaactgatgcaaaatagagtccaggttaccattgctaattggcaaaatggttctttacaagatgtattgaattttattagcagaaatgctcgcgtctccataatgaatgcaactgtacaaggttctttagtcgttggttatgtgaataaccaacagcaagcacaagatgttaaaaagtggaatggtgcaaaatttgcaggtaataatttgaaaattgatattggcccacagtctggttcaaattccagtaatggcacctcaagtactgtccaatttcttagaaatcttatttacaaaagatatgatcgtcaaaacaaaatgttgaatttaggtgaattgatcaacgatccagaattggttaataacaatatgtttagtgccatggctagacaatcgaaagtcctaccagctgttttaaaggttgcatctaacgaaactgagttaaaatcaatagaaagtttaaacttagccaataataatttgaaagatttgtcactaatatccaatttacatttaatatttaaaaatttgaaaaatctttgcttagccaataaccatttcaataggtttcaggtattcaatcaatggaagaataaatttccatatttaagagaattgttaatgattaataatcaaatctgtaatgatagaatgtatcgtacagaaatgttgaatattttccctaaattaacaatattagacaacactttagttcgagacgaagctaaattaaaatccgtattttcaatcatgccaaatataaatcaacaattaactaaattccaaccatttttctttgaagatcaaaacatttccaatatttctactaattttatctccaatttcttaaatctttgggatcaagacagatcccaattattaaatttatatacaccacaatctcagttttcaattgccacagattcctcagttccaagttctacagtcaaagaagctgatcagaatccatcgtttggtcattatttaactacatccagaaactttaccaagatttcaacacctaaattattacaagagagattagctataggtccggaacaaatcagtaagcttttcaattctattcccaaaaccaagcatttcttaatagaaaatccaaatgattactcagtggaggctgtaacataccaacaagtcaatggatatttgattactttgcatggctattatgaagaagtagataaacctctaaatgactctgttaatggtaataataataataaaaagacttcaatgagaaataaaagatatcaaaatagttcaaataataaaagactatctaaaaaatcatttgatagaacttggataataataaacaatgcttctactaattctatcattattgcctccgatctattgacaattagatcctactgttcaccatcgtggcatattgaacaaacaccaacgccaacgccaacatcaaaccaacctgtaatgaatcaaattatgaatgttagtacttctattccatctaatagtactgtgccaatgacaccagcaaataattctactatgatatctccacatttacaattaccacctgaaattcaagctaaattaagtccggttcagttggaattattaaacaaactacaattacaaactaaattaaattcagaatacacatatatgttggctgaacaaagtggatggaattttgaaactgctattgttgggtttcaaaatagtgtaggtaatttacctccaaatgcatttatacaataataagttatagagagttatattatattatttatatatagatagataaatatttactttgatatatatatatatgaataaatattagtaatatactcgatgtttaggtatacatacgtctatgtatgttagaaattcgtaggatagttaagactacttagtgaagtagatgaataaaataagacaattttgacagtgctacaatttttttttgtatacagagttatctatagagaacagaataagatgaaaaacaagtttcaaaaatatgccaatgatttgaataatagtatatactgttttatatgcggtaaattctataagttaatatttcaaattctcggttgattctttagaaatagagtgacctgcttcatttaaaactttagaaattatgttaagttgttcttgtgcactattccaatcttctttccaaattgcatcatgaaaacctgggaacaaccataagtcttcccttagaatcacaccatcattactggtctcaacaatattaagatcaataccttcaatagtaccatagtcagtccaaaagggtggaccaataatgatattcttatagaaagttctctcgggtaaaccatattcatagattgtctttttaccaatatgacttaattttaaattccacgcacacctttgttttgatatagacaacggttcttctactttgattgaatgatttttaattttgaattgggaatgccattttaactgccattggatccattcctgactcaattttttccattgtaacaaacttctaattatgtttttgaaatttaattgtcgatcatatttgatcttcaagtcaaatactttttcattgataactttagtaaaatgtaataagttgaatggtatcataggagcgtctgtcaatcttaatataataccaattgtgtaataaatattggctttaataatattttgatatttttttttatgaagtttaccttgtatagaatcaaatgtgtccatgaaagaatgaactggaatatttttattattaacaatctttgatgttatggctgctgttggaataccgtttgccaaaaacggtgtccaatccccatatttactcattgtagtaacattctttgatagtattgacccaattccatgaaaattttcaaatagtggttgcaataaggggtgtgccatgatatctatgttttggtctaatgacaattgactaatatctatataagaatagatctctttttgcaatcttaaagattccttttgaacaaattcagtggacccaatatagttatattcactaccaccaaatgatataaagtatatgcttcttaatgggacccaattatatttaaactttaattcttgaagtaactccataatacttaacatataagttaatcccatatttggaaataatgcacctggatgtaaagaatttcttacagcaccaatgattattgctttctctggttgttcccttccttcaattttacccataacattataaattggttgtctttcctttatcacactggttacatttattttacattgtatatcattgccattaccactataccaaccattctcaaaaaggacagaaccctttgaatcaaatttagattgaatcaattttccctggttagatgatattgatataatagaaacgtatggtaataattcagttctttttgaattcaaaaggtcaagatatccatgagatgaagcttgtacagacagaacatcgccggaaccatattgcaataacccagcactcctctgttgaatcgcatcattaaaatcttcaccgtattcgtttgatacaaatataataccttgtgcgttatatttttgtgctaaaagaatttgctcacttattggaattatatcatctggtgcaaaatgtaataaaataacaaacgggtcctcaagcagaaacttttttgttaattgtaaataatctctttcagtgccataatggccatatatgatattggtcttgttcagttgatcattaattgttaacgaaacaaaatttaattcatttagttgaatttcaacaattttgttatcttcgtcattttcggtgtttacactattataaaataaagagagtgtagacttgttcatcaaatcaggataattcacgtaaccctcatactttttatctgctacatcctttaaatgaatattttccatatatttttttatgtaattttttatagccatgtctcctctagtacctgatttatgtggcatagaagttaaatattgtaaatctgtttcaaatttattcaaatcaatatgatcatttacatattgtagtagcatatcatgattagaaaaggtggttccattagagtattcaaatataaagccagatctccatataacccacatgattatggatacaacaagcatatataaaaatcttttcaaaattagtgggttaccaaactgagttaaatacttatccaattttcttgtcattagcctttcaaattcagaaagtggttcgataatgctagtttgtattggaactattatattatgttttatcttattataaatggtatcacctgaagtaatactactattaatgttagtggtgctactagagttgttattatttataaagggaaggttggtatggtcatcgttgttgttgtcaccattattatcttcattagtcatttgtaaattttccaaatcgaagaattccatttcatctgtctctatcaaattaacctctgtggaatttcgactcatttcattatttgtttctccaattataatatcgtcttgtattctagaatatcgtcctaccatttttttttctgatatattgttatcttttttcagtgtaaataaaacaaattattaaacaacatcagttatatacacgcagatataaatcactatggattcctgattgatatggagttgtaaatattggcaaaaagatacgattacacatgtgatttacactcccaaacagattaatttgacagacaatatgcctttaaacaaatctcattgtaaagatttttgtaactttttttttgtatttttctttttttttgatctgttgaatttttcatttctcgaagaataaaatattcaatgtttaatctgtgctttcttcaataataaaggagaaatatatagttgcatagttagaggtctttcatgaatatattatggaaaggaggttgtggtggatttcaaaagaaaaatatataagaatatacaatattcaggctttggtggtaaagaaaagaagaattgtactttcattgaggtaagtgagttgaaaaacaagataaaaaaaggaaaagcaacaactaatagaaacataccataagaatgatgaataatttgagaaatagagtttccaatccaggaactgagggatataaagatacaagggtcaatattaatgccaatattaatcaagaattattggctgaacagaaacaagagatttatgaagcatttaatttatttgatatgaataatgatggatatttagattatcatgaattaaaagtagcattaagagcattgggttttacattagataataaatcagtaattgaaattattgacaaatacgacagttctggtaacagattaatatcgtatgatgacttttttatagtatctggtgaaatgataatggatcgtgatccaatggatgaaattaaaagggcattcaaactatttgatgaagataatacaggtaaaatatctttaaagaatctgaaaaaagttgcacaagaattgggtgaaaatctgacagatcaggagttaagagctatgattgatgagtttgatcttgatggagatggagaaatcaatgaagatgaattcattcgtatatgtactgataattagaagacaggattagtgttccctttgacatatttccttatttaagctttgcaaaggtagacatgtattgttaaaagcaaatcaatcggtaaataaataaatatgcatattaaagaaagaaaaagaaaagagagacaattcataatcaatttttgtaactattattcatattaatatatatttattacaattttttatggcgttgtcttatattactttgcttcatctttttaatttttagcttttattaaatgaatctttaagtagatcagctgatgcttaattattgtataaatattatatatatatagctatctgatgggctttgttatcttgtttattctggttctgaagggtatgtgtttatgttatatatatattttttgttagattcgttttttcatctcttcttttaaatggtagttagataaaaaacgatgaaaacctttgagatagcttgataggaaaaagaatattggttatagaaatatttcatctgaaagaagcagttctataactgtgagtaagtctattacgatatggagaaattaattgtattaaaatgtcatggtcatatgctttatccccatatattctccatccagagacatttgatgagaatatagtaatttattttgatgataaggctactattattactgatcaattcaataaatcagaatatcatttattaatattaccaagagatccagaattaactaaaaagcatccatcaatagctatcaacattgagttaaagaacaatattttacagaagtatattatatggtgccaaaactacatttacgaatcctttgttggaaaatttgaaatattaacaaatgatctaactgataagaattcgtttataaacaattttataaaagttggggtacatagtgctccatcaatgaaaaatttacatattcatgttataactaaggattttcattctatgaagttgaaaaataagaaacattataactcatttaatacaagtttcttcattgaatatgatcaattacccttagacacgatacctgataaagaagaaatagaagataatgctataaagaaatctgatttaatatgtagttactgtcacaaaaattttggtaataaattcagtcaattgaagaagcatttggatatagagtttaatgatcattttaaaattaaagaagcagaataaaaaaaaaagaaaaatatagatggaataaattaaaccaactttatattccatatttttatggatacaggaaatttagaaaataacaacagggagtataagacattttcaagtacaaccttcttcattttactttatttatctttatctcattcctatctatattccctatatatttgctaaaaatttacctcttcatatatataatggattataatttttgatattctagagtaccttctaacttcttcacctcagctacttttctaacagccttcattaaatcttccggtataatatgatcacgatcatctctaatagcaaaaaaaccagcttcagtgacacaattacgaatatcagcaccgttgaaaccatcactcatttttacagcggcctcaaaatcaaaatcaccatgttttttaacttttgaagtatgtattttaaaaatttccaatctacctgcttcatttggtaaaggaatttcaatctttctgtctagtctaccgggtcttaataaagcaggatctaaggtatctggtctattagttgccataatgatctttgtctgacccaaattatcgaacccatccatttgtgttaacaactccatcaaagttctttgaatttctctatcagcagatgtaccttcactgaatcttctgccaccaatggcatcaacttcatccataaatataatacagggctcgtgttctttggcgtaggcaaacatctctcgaatgattcttgcagattcaccgatatatttgtccacgataccagaggctggagaaaagatgaaatttgcaccaatggtagctgctactgctttagctaatagagtcttaccagtacctggaggtccatataataaaactccctttggcggctttatacctactctttgaaagatttcagggtttttcaagggcaactctacgacttctcttaattctctgatttgttcagtcaacccaccgataccatcaaaggatatctcaccttgttcgaatgtagtcatgttataaaccaatgggtctgtttctcttggtaaaaccctcattatagtcaatgtagtgatatccaaagtaactctaacaccttttttcaattttgttctatcaacagagtttctaacacctacgatataacgaggaccagaagatgctttgactatatatttttcagtggataactctttcatgacttcaccaatcagctgcccaatggattgtaacgctttaatatcattttcagtcttatcgaattcagcttccaaatctcgtatattttgtctacgcgctttcaattgatcatcaaatctacgatgctccattaatttcttcttaaactgtgtcaatgccttattatatgcttctttttcaggatcgacagattctgggatattagaagtctcttgaacagacgaatcttgaggagctattgagtgttcatttgtactagtttcttcttgagcttgatcatttaaagctgctaataatggatcttgttcctcactcatgttgtgtatctgcgtgcgtctatgtttatgtattaatatttatatttatatttgtatttgtatttgtatttgtatgactactgggaaagacgtttgaatgttcagactcatgtactatgatcttctatagcatattttaacaaacgtatgtttgaagttaatagaacacactcgtcaaccaatacattataatcccctttcactttaaacaagcttcttatcagtggcaaaataaaatgcaaaagaaaatgaaacaaaaacaaaaaactcaattcttcttttcttttttcttttctatttctttttctttatttttttttttattgttttggttttttgctttttcccgcaaaaactgcagctggaggtatgggtgttctaaacacatcatttgtgaaacactcagacatcaaattttcctattgtttgtgggttttataagtcacgtgagcataaaaggcgggtttctgacggatttatttctgcgctaattcctttagaaatccgaaaaagaagaaaaaaatttttttattttttttttccattttttgttaattgttattgtttgttatgaagagtattattattatcattattattattattattattattatgagcaaacgtgcgaagcttcgatgagtgagggaaactgtgaggtggaatgaaatgatgtggattgcttgacgttagttgttgacgaacaacagatcgatagcatcatcttcttcgtattccaacaaaagtactaccgcaccttggtgtatattaattatagttgttagtgctggattaaaatatacaggtgatatctgtttttttttttttttttcattttattattactattaatttttttttttattgtcagttgtcaattgttattagaatagagagaaatctagatatattgaaataaaaaataaaaatgcaattacaagcattcatattctgtggtggggggcataacttatcgcctttttcaagttctaccttaggtgagtttaatgataacctggaacaatctggtctcaaggatacttctaatactaactctaatcccactgatactactgcttctatttctgctaccacaaatataaacatagatacaaaggcaaggacaaaaacaactagtagtaatagcagtggtaacaatgatacagctaacaatgatgacattgttaacatggatttcgatttagatttcgatttcgatattaatgattcaattatcacagcaaccggtcatttaccaaaagcattattgcctgtagctaatcgttttatgattgaatatgttattgactggtgtgatcaggcagattttcatgaaattaatattgttgctcataaagatgaaatcgatattattaagtttggtctttctgaatttcttaaattgagatatgaacaatacaaaattattgaatcaaacttacattcacatactaataataatggtggtagtggtaataataacaatcataatcattgtagtaacggtggtagtaatttgaagatggaacatttgaaaaaaattaattttatacctaccagttcagcatcaatgggacaaattttgattaatgagcttttgcctttgattaaaatggattttgtcttgttaccatgtgatttcatcactgatataccaccacaaatcttccttgaccaatataataacagagacgacgataatttggcaatctctgtcttttatcaaaacgctttggatagcaccttggataagaaaaaaatgaagaaagatcaaatcttcactgtttataacgatgattttgaccatcaagaggttcaaaaacaaccaattttgttggatatttattcgaatgaaaatgttacaaagacaaaatatctacagattagatcacatttgttatggaaatatccaaatattactgtttctactaaattgttgaattcttctatatatttctgttcttatgaattatgtcaattcttaaagaaaccaaggaaacagcatcataatgatcatagcaatagcgtcaatcataataatcataatcataatcataataataataataccaatggcgatacaagtttagctgataataacaatttagatgtcggaaatattaatgatcttaattcacaaaagttaccctctaataatagtattgataatgaaaacaacactcataaacataaaaataatggtgatgatgatgacaattctcaaaatagaaactcatgtgtcattaatccatcatatttcaaacataacaataacttgttgattcctgatagcattaacacaaatacaactctatctaaattatttagagatttagcaagaagatcctggagacatgttaaagaaaagagagaaactgttggtatttttatcctacctaatccatcattagccacatttattcgttctaataatttatctacattgatggatgcaaatagatttgtactaaagatcaaatcaactacatcgtctctgattgcatcctcatctgctattggtgcagatgcattggttgatccatctgttatattaggtgaaaaaagttctgttaaattgtctactattagaaataactgtattatcggtaaaaaatgtcgtatcagtggttctataatcttagatggtacagttattgaagatgaatgtatcttagaaaacgttattgtgggtcctaatgtacgcattggtgcaaaaagtaaattgactaattcatatattgaaggaaactatgtggttgaacctaaatcaatgataaagggtgaaactttaatgaaggttattgaagatgaaaacgaatttgatgaggatggatacgcaatatacaatggatctgattatgaagctgatcatttgagcagtgatgcaatttactcctcctctgatgttgatagtgcagacgattattatcataacagtgacgattcattcgatgatgatgtacatgatgcacatgatttttttgaacgttagttgttaggcttatgtatgttcacgttaaaataataaatacaaagaataataatagcaaagagataaaaaacattataatataacatgtattgtatatcgtggaatgtccttttttgtaggttactacttacttgtaacataatatatatatttatatattttcataaaagataacatagaaaatggcactatttgatacaatttaatatcttttataataaacaattttgatccacacagaaaattataaatttttttacaatatttatacataaatattaatctactcatattatattacaatataaaactcaatatccagtattatttatttgaacagtggttttttttttagtcttactacaaaatattttctgttattttataaagatttctttttcttttttttattttcatttcttgcaattcggaaatttagaaattattagtaaatgaaaaattgttaatcaagtatatgtggtagtgataataattatgagaaagtgaaaatgggtaaataataataataataatgataataatataaacttctggactgcaagttaagatatctgataagatttttaagtaaaaatcagttgacatattcggactgtcttttttacctgagtttttcagtgttttgaaacatatactagaagagaagaaaccaacactttataccatttttctacttttaagatcattgatattttgactcttttttataatgtcattcgctcaaattgttattggaccaccaggatccgggaaatcgacttattgtaatggatgttctcaattttttaacgccattgggagacactcccagatcattaatatggatccagcaaatgataacttaccatatccctgtgcaattgatattagagattttatcaccttagaagaaatcatgtctgaacaacagttaggacccaacggtggattaatgtatgccatggaatccctgaatcaatccattgatttgtttattttacagatcaagacattagtagaacaagaaaaagcatacttagtctttgattgtcctgggcaagtggaattattcacacatcattcttctctgtttcatatcttcaaaaggctggagaaggaattagatatgagattttgcgtcgttaatctgattgattgtttctatataacgtcaccatctcaatatgtttctattctcctattggctttacggtcaatgcttatgatggatctaccacatataaatgtattttcaaagatagatatgttaaaatcatacggtgaactacctttcagattggattattacaccgaagtacaagatttagattatttgataccctacatagaaaaggagactagtggtagtccgttaggtaaacgatacagtaaattgacagagactatcagtgaattagttagtgattttggtcttgtttcatttgaagtcttagctattgatgacaaggaaagcatgattaatctacagagtgttatagataaagctaatggttatatttttggatcttcggaggttggtggagatactgtgtgggctgaggccactagagaaggtgcaatgagggaacattatgatatccaagatagatggattgatcataaggaagaatatgataaacaagagttagcaagaagagaacaattactgaaagagaagaaaatggaggaaaaggagattgatgtagataatgaggatgaatgggatagagcattaagggaatgggaagcaaaacaaggaatggaatatcaccgttaagaatcaagcaatattttcgtagcaatactaaatgatgctagcaacagtattgtatggaataaatcatatgtaacatataaatctatttattaaataactatgcatgaaggtattgaaatattcaacggtgccataatttattgatttattcatcacttcagatatatgtatttttccctaatgccattaaaaactttctactttaataaatatgtgaacaaactctatttattaagcataggagttactcctcaatatacacatcgtgaagcaataaataccaaatgttcaatgcaatatttgtggttctgtatctgtttgtcttcgtaaatcgacttcttgtgttccacaattgtttttctttttctggtaacgacatcggacctcgacaaatcttcctttttaggcaaagatgacattaaaaaaaacccagcgccacaaaagcataaaaccagcaccaataaataataaattataccaaacagtaatatctatttaatagaaataacagtaacataattgacacatagattatgtaacggtaatcgatatttgtatatatatatagaaatggttgttgcagaatatgctggttttgggagtcctccttagagattatctctttgaaaattctcattatttgattctgattttagctttggctttgatatgttttggttagctaaaagttttacttaaacatttctatccaataggttttgtctttttgtagcttttttcatttagtatacgcataaataccaactataagaacacaagaaacgatgcctagaaaatttttaggggaaaaaattgaccctaatgttgatgctattcgacctgcttcaatgacacttacatcagcagatttaatgaatattccaacatttcagtttgaggatgatcctgtaaattcggaagatattgatgatcataaatatggtaaaagattatcaagaaaattcggtggtaccatgaaacttaagaaaacgttagaatcagtccctggaatttttattcatgattataggaaaagattgcaattagatagagaaacacaatttcgatctaaaaataatagcaatattagtggtattattatccctaaaatttcactttctcgatatgggaatacaaataaatcaaataacgaattaagaccaaagaacttgcaagagcgtagagttttacagaaaaggatttcatctagaaagttatttgatttgcatgaattgccggaagttaaagaaaaggtgattaatgatgaacaatcatttatattagatgaaaagacaaacaatgacaaagaaaatttttctaaacacataaaaaatcttaatgatataactacttctaataacaacgatagtgagatatttcaggatattatttcttgttataatagtgaagaaaagattgcaaataaacaacaggcaactgtttttaatcgtgaattagaaagagttttaagtcatgttgtcaaaattgataatatgaataagatgcaaagggaatttggagcaaaagatataaatcatttatgtttacctacaaaaataaataatatgccgttaactccaacatttaattcaattgacacacagttaaatgtacttgatggttgtaatgaatttacagaatctactccttctagttctatgacagagagaacatattccttgaattcaccgaacttatctgcaaccatagattcaaattctgcatataatacagcattggaagactttgattctttgaccgatttatctattacaaagattccgtctgctataagtgatgaagatacgaaaaagtatttatcgcaaggtttatgtactatgtctttaaatgttcagaataataccagaagaactaatcaaatcaaggtcttgaggttaagaaaaattgaaataaaacctacaattgcaacgttagattattcaaatggaaatgatacggagttggaggaagatgattatattatttcacctcagtatcctacaaaacaatcattaatggtccatcctagagttgataccattcaacaattacaggaaaaaatagatcatattaagttagcaaaacaaaatacaattctatccttatccagtagtgtatattcggaacgctagtacctatactttattctatttactaaatgtttaaaatactatcacgatccgctatttatcacattgttgataatagtattttacatatagttaataataatgtgggcaaataccaagattgcaataatcattgtaagcccattaagtatagtttaatgtaattatattcattatataaatagttagcagcattataccctaaaagtttttattatgaataggttgtaggatatggtatgtctttataagttgttgtttggtgcaacacgctatacagtatggtataccaggcattggatatgattcaagcaaaaaaataattatttatgggataccttacagtattgtgtcatgcgtcctgggatgtaaatttgataaagttgtttctcctttgtatagagtcttcttccttgtttcctttcttttcttttccttttattttattttattttattctagataggtggtaaaattcaaagattaaaaaactcacaagacagctgaaagattgtgtacgcacaccctagcgataataggtttgaaagagtactattacaatattaagatacaatttaactagagttagaaattacgtcaggatattgattttgtcatagtgttaacaagatagtaaacaagaggaagcatatctatccaattttaacttattatatactattgacataacttaacaactaattttcagagatggcaccaactcaattagagattaaggttaaatctttacaaagattaatgaaggaagaaaactactatattcaggagaagaaagatcagaaagaacttcttgaaaaattagaagcagataaggaggttgatccatatgagttaaagaaacaaaaagaaattttagaggatacagaaagattgttacctatattatacaataaaatcagacaatttaaagaagatttagaagaatatttaaaaacatatgaaggtgatgaaaacactgatctggctgtgactatggtttccaaagccaatgatatgttagcatcaaaggtatgattttgctcttccctgttgatttggtctggtatatatatgtatatatgtgtttaattgcaacatagctataaacgaaggttctcccaaaactgataatctattacatcaataattctaatattatatatagttataaaaacaatagtttggaaggtgctgtcttcatatgaatatatgtaaagtgaatatgtcatattctttttgttgaagtattttttttctattattaacaatcatcgagattcttttgctaatatcaactaatgatttaggatcgaacacaatattctttctcaaatatttaaaagatgtgtgtctacaatcaaaaaaaattacctgaaattatatatgtacttgaacttgaaagctaacgatctttaaaacagttataaacaaaacttagttataatatcattatccactatattgactaaaaaaccaaagacaaacaaaagaataagaaagaaaagtgttaatgactgaaagattgcgggggtgtataataagattgtcctcgtgtaagtatagtatatcgaggacattgagattaaattcaaaaactccatttacactttcatcgaagaatgattttcaagagtcaaccaaaagtaatacactttatgcttttttgaatcaattaatcaaaacacagaagttacaatttgtacctgaccccctagtaaactcaactaaaattgtaaggctaattactagccaaaaggatatcaaagatgattacgacccttgcttaaattcaccagagaccttgccactaacgtacaaattaaagaatcaagaggatgtgagtaaaatatcacgttggagaaagtggccaactttagggtttcgtgttggtaaaaaactactgttcttatatagggaatcaattaagacttcttggatattatggagacaacataaaaatgttgatgttcatgaagtgttcagacaattagagttgaacaatttaaaacaaatgtttccacaattatcaagaaaaaaattcgttcatgatgtgctaagatttagagagatctataaattacctaaatttatactatgtctactattatttgaagaactgacctttttgttaatttatttaagaccacaactggcattatatcgttgtttagggagtggtgcattttataaattaagtaaaaaatattccaaaggtgattatatttgcaaaatattatgggaccaatcaatatcgaaacaaaatcctcaaagagaaccatataatacagtatattccttgacaaataaagataaattacgttttttacagaatttgattataaacaaacaaccacgttggaaactgaagatttgggaatattttaatcaaactaataaattgtctaatgagattaatacattattaaagtacttgattgtagatgactggctaactttgaaaagaataattgaatcacaaaattcacaacaggatacatccattaatatttcttataatgaattagtcaattatattatggaaagacaactttattatgcaaatgaagacttgaatttgatggtaaatgatcctatagataggcaagttttaataaatagattgatatgttactggtcatttaaatttgatggtatcaatattaaaaatggtaccatagattttacgaataagtggggcgttgataatattaatttattttattatacaggaactgttaataaaagggacgatgataaatttagtttgatcaaacgggaacatataaattatttttagaatgacaatatatttgagagggggtaaggaaccaaaaaaaaaataacttcatcgtgtaaatagtaatctaattacaaataagattctacgtgatcttaaggcctttattttcttaatttagaatacaggtagatcattaaatatagataaataagttttttttgttttaaacaaatatataaatatgaaataaacaacaaagaggaataaaataatctcaattctatataaaataaattaaaaacaaaatagagaataggaaagaaattttataaaagtcctttacagttatattttataagtctttccatctttaacaattgtatgatgatgacctggagctctaacaatgttattcttttcgtcaatagtacatgagggtatgtttgaaaaccattcatcgttgaagatatcatccaaagtagccctcttagatacatcaacttcaagaattctggataaaattggtcttgaagcatgtggtaataaacgcaacaatctatatggaccatgaatgatttttctttgatgatgtggaggtttattattttcaatagatgcggtcgtattagccttctctaactgaatggatggtacaggttttgtattttgatgagtattattagtattattttcttgtttctctgtatctttcggtatggatacgatatctttattatctttaggtgatgctgctgcaggagcatcagttgcagcctcagtagttttctggtaattattgctattgtcattagtagtgtcattttcattgtcgttattattgtttttatcattattattatcattatcattatcgttatcgttagtgttatcattttcaatttttttatcattttcatcagttggggtaggtaattgtttaactttatcacttgggtttgcttgttcagttaagctgagtttttcttgttcacgtctctcacgtctttcttttaataattgttcgtgatgcttagcagattggacatagtcatgtggaaaatcgtcaggcattgaatacaatttaaaattttcatcagtcatctttggtgccttccatgggaatcttttcaacatcatacaacaaaatattatccccattgaccaaacgtctacaaattgcggatcatatgactttgtggatgttagaacttcaggtgccaaatatgggtcactacctacaattccatgagccatagtaatatggtcttcgaatgggtatctaaataccatagcgctaccaaaatcaatcaatttcaagatcccgctggtgttcattacacaattatccaatttcaaatcacgatgggctaaacccatggaatgtaaatatttaacaccactagcaatctgcttaaaacaacaattgatttcaccacgagacatcaatccggtcatgacaacagagaagaaatcgacaggcaaatactccatcacttggaaatatttattttgatggaaatcggagaagatatcaatagtttggacaatatttgggtgatgtaaagatgaaccaatacaaaactccgcagtacatttctttgcatattgtttaattgactcgttttgtttacgtggtctgaactctttaactgcaaaagtggcaccatccgtcggacgcacaaggactttaactgaaccacctgcaccgctacctaacgttttacctaatttaccatatttttgtgctaggattgtatcatcatggtaaatatttattgtgttggacagagacaaaacagaatcagaacttggcggaatagcagaatttgtatgagatttatgatcatttggatttacgagatgggaatttagatttaaagtagtagttgaataaggatggtggttaatagaagagtgtaaaccatgcaaatgattatttttgtttttattttgatgagaagaagaagaaaggtggttgttatgggatggagaagagatagatgtatgtgtagtagctaaatgatgtaaattaacaacagattttttggaagatctgaaaaatcttttcaattcagacatagaatgagaaggttttggagtaatagggttagtattattcttatcaagatggtcatttaaatcggagtttgaaccattgttagagtgatatgtatgatgagcataattatgtgaatgatggtttaatcttggagatgtaggtatattagtgttgttatcacggttatgattgtgggtatggctatgaccatgactatgagtactgttgttgttattgttgtgaggatgattagaattagaatttatataaaaagaggagtcgtttgatttgtcacttctaattgattccatacttggttttctacttagaaaacttagaaaagatttagagcttcttttcagcaaaggtggggcattattattgttattgttattattattattatttatagaattatttgatggtacgacattaatggaagaattatcatttaagtgtagatcatgaatattagtattagtattagtattagtatgattattattattagaagtatggtgaaatggatttttagacaatattaccattttctatctttgtattctattttttttttcaaagattatttcgattctggaagacaatattattttctttcttcagatatcttagtagagtgatcacaaatacaaatacgaatacagatatagatacaaatgcagatacaaatgcttgcgtgtgtgtgtgtgtgtgcggagggggaggagggtaagaaaagaagggaggaaaaatcaagtatatagagatatagtatagtattgattaacaaattaagccactataaaagttataaaatagccatagtgtctgcatttactcatccgtctattcaatactttttacatgatctctgtttattcagaatctgtgtgtaatcatgttggtatatatattttctttgcaatgaaaaatatacaatatacatataaataaacaaaattgagggaaataggcactaaaaaaaattaaaaaagtaagaaaaaagaaaaaaaaaaattatttcccgttttttgtttttgtttttgtttttcttctttttttttcttttttctttttttttttttttttttttttggtttttgcttttgctgttcgacccgacgaatttcctctttgggcaaagaatgaggatttcactcacagccgaattgaataacaataggagtggtaaaataaaatacaaaaaaaagggaagaaagaaggagaggaagaccaggaattaagtgagacaaatctccatggtaacagcaagtaacgcagaatttgttggatgttggatgttggtgtttccctttgataactgcaatagagaggtatatatgataacgtattagagcaataacaaggataagagaggaggaaaaaaaatgtagaattacagttctctgtgtatataattgtattcttgcacctgtaatatgacatatatattctatatatatatataatttatccaatattgcctgtaaaatagtaataagttatacactttaaaaaaaaaaatgtatggtttacattttctatatacgtaatgtatgataaagttatggaaaaacttaaagagctacaagtaatcattactcaaccaattatattttcttttttaaggtctcttatgtaaatctttctaacatctcctccctctcgcttccaccccgtaacagttacttatacagtatatagtgaaatttacaaagtaataactggatttaaattacagtctacccagtatctctgtctacaatgctgtgcagtcgtcctgactacacaataagtcaattattattcattaatttttctatttatgtatgaattttgtgctttttgtatatatatgtgaacgttttattagatcaatcactgttaatcatattcttttatagttgttgttattattattattatttatttttttttgtttttgtttgtttgtttgtttgtttatttttttttcttattagccgagtggtttttttttcttatttttttgaatgtagaaattttctatttttgaatttatttttatatcttgaaataatagcaacgacatacaacaatagaggaagagaaaagaaaaaatgagaaaatgatagaatatcatatagtgtgttatagccgggcaataccgcacagggcgacactaataaaattatccaaaaagaatcatgccactaactagagtagaatgcatagggaacataaggaggtacagagatggtcattctttggattgggatctccaaatatacactatatgcatttgttaaaaaaactatgtatataatataataatatatgatatgtaaagcatatggtagtatatggtggtatacggtggtacatagtatattcaaatgaaaatataaataccttgaaaatggtgaaacatgagttagggtttatatttttattttttttctttttccttttttttggacttgataaggtgccccttgattagggtgtcaattgcaaaaaaacattttttcccattcctcccctccccccttgatattcccttttcatttttgcctttatttgttatccttagaaatcttcaatgaggattactggaaaacattggatttctcgaaagtaaaaattatattccagttggttatcaacatcaagatatttgttttcttgcttttactctcttgtcattatactcgttttttatcgttatttttgtctataggatttgccgtgtttaggacagtggggggataacaattatgaatgcagatcataaatggcaagtgccattatctgaaaaacaaaaattagatttggataaatctattatagaatatatagattggcattttaataatgataggaataataataattcaggatctgatataatatcaagaggccatttgattcaaaatttaaataaattatttcgaataccaaatgagaataatgacaaagttggtaagaatacaggacattctaatgaagtagtggttgattcacatcctaaacagttattgttgccaaggaagtgggattctatcgtgcaattacaaagaaagatcatgacattagaatcaaccattaagcaactaaatattcaattggatagtctaaaagatcaagtaaacaaaacatcacatgataatgcacttgtcctgaataataataataatagcaatagcatgtctttatggattccaaagagttcgattttcaattcattgacagtcgaatcctcgattacagcaattaaactacatccatttttacctattgttataattggcacaaatcatggaaaattatacttatttgatattctaaatacttctttacctttgttatcaatcaatgcacatactactgcaataacttcaattgatgttacaataaataatggagttgtatctgatcaaaagtattcaactgattctagcaatgatgataacagtgatactagtactagtaacaaaaactctattattattgtcacatcttccaaagatatgagtattagagtatgggaatggaattcaattaatccagcatcatatcaattattcaaaactttaatgggccatgatcatattatatcgcaaattaaattattttttttccatggaaatagtggaagcaatgataacaacaacaacaacaacaataataataataataataacactagtagtaatgataatagcaatactcttctattagtatcttgttctagagataatacgattaaaatatggaatatacataacggttggtgtattaaatcaattaataacgcacattcagattggattagatctattgacgtatttggtgaatatattttatcagcaggccatgatactagtgttaggttaactcattggcctacagggaatggactctctataggagttagtcataattttccaattgaaaaagttaagtttataccaataataaacaaaaataatacaaacactgcatccctttcttccactaccttcagtgtgttgaattacagagaaaatatttataataataagatgggattcaaatattgtttaacagccggaagagacaatcttataaaaatgtgggaaataccaacaccaaagttcactacaagcggtgcaccaataccgaatataaatcaagatgataatcgttttacaatggttaaagaattcaaaggacatacctcatgggtgagagatttaaaagtttcttattcgaatccagtttttttctcttgtagtgatgataaatccatacgtttgtggaattatgaaaatggtaaagcaattaaaatatgggagaattaccatttaagttttgttaattgtattgatatggattcgtttatgaatcctcaaaattcaagaaaattattagtttctggtggtcttgattgtaattgtaacattttaatgaattaattgatggattatatatgtaaataaaactagttagcattaaacaaatatattcttttatgtatttatttatatccttatctatagacactaaaatatggtaaagaattaaataaaaatgaataattaaagaagtgcaaataaagttttaggattatgttgtggcctgcgttaaaccttaactattattactttttacacttgttgcagcaacagctagtgataggtcttggtaaatgaattcaaatggtaaatatgcaataccttcaccaacaaagaattttgacatagattcgacccaatgtaaacgtagagagtgtaacatagctgaagtaccttccattacgactaatatacagacagttaacgtaaaccacatagcaaacaaaaacacagtcattaagacaccagtaataccggtgactccaaaggctaaattaatagtcatggaccacagaacacttgataattgggcatgtgccaaagataatgcccagagacgtaggtatgatgcagtatgtgaaacacagtttaaacagaattcaattgtatgtataacttgatggatgataacatcaccaaattcttcgtcatgcccttcctcattctcatgctcatcactgttagaagtttcgtatatttcatctatttcattactactgtgtaggaattcatcaccttccacttccgaactttcaagatcattatgagctggtaacttgatatgacctttatttttttgagataatttgaaatgcaatggtttcacaattaatagccatggaacacatattaatgcaaggactagcaatatgacttgaactttatcttgatatgggtataactcctcatcaacaacaccaggagataagaacatgttgattagcatatttaaaagcgctggagcaggtttttcatgtttaatccagtcgacactccatttgtaaacaatacaaatggataagtaaccaaaaataccttgcataaatattaaacccggaatgaaatttgccactatatcaatgaaggaattgaaatataaatgattcattaaggaaaacatataagaataagacatatgaatgaatcccattaaaacagaaagtttcattttataggaattggaaaaaagtaaagcattttcagtaccatgccaagcagaatcaaggcctattggatatgtaccaacttgtgtggcagcaatggactctcctacttcccaagattctggccatttccaacctgatttgaaaagggtcattgtcattgaaaagatatcattgtataggaatccagtgtacattgaaaaaagacccattaataaaatgatgtatctaccaacataagccatgtcaaatatttctccacgcttcatcttgtctattttttttttcattcaatacaagtgttaatcctgctaaagtcaatatgaaaccgtgaccaagatcaccaaacataatggcaaacatgaacgggaaagtaacaattgttggtaaaccagcattaacttctctgtactgggcgataccgtaagaatcacaaatattttggaaagcaagggtaaatttatttgttctatgaaaagtgggggggagttttgttagtctctaaaacttggacaatagacggaacatcaaggcctaaattggtcgtcatttcatttagacattcttgcaaattatatatttcatcttttggtacccaaccttcagctattagaatttttctgttagcatcaaaattgaacatatttaaggcttcataaacatgtttttctttacaaattatttggaaccaattatttaattcctttgagattgcaataagctcactttctaaggtggtggtagtggtctctaaaacagtgtataaatcctctaagctcttgtttacatcaagtaattgatgagaccgtctttctgctgatttatcaacatcatatagtttagcatctagggattctgctatttttctaattctatctagaattaaatcaccatgtgagaagacaataaatgcatttttagcgatgtattgtttcgagttagagtcatagatagattcattaatttcaatgttgctaaataacaaattacctcttaatactctccagaggatttgctctaagcttgcaattttgtttcttggaataacaccagttacataacttacaccatgttgtcccatagtagtagcttcaaaatcaatactgtcccgtctacctaaagattgatgttcttcacttggattaatgttatcgctacttgtattaaaaaattggtcaccagcttgcaatacatatctgaattgctccaaatctgttttctgcaatttaatttgttctctggcatcttccatttgaattaaacgcttctcaagaatggtggcattttcaacatgatcatcaatggtagatgtgctcggaaattcaatattgttgacatctaattgatcttctgtttctaacagttgaatattatgtttctccaaaagtgtgtaaagataacgatattgtctttgaacagaatctaattttcttatttcgttgacataagaacgttggaaggaacgaactgtagaatttaaatcacggaattgaacaataccttgtttccccaaggtgtatactgcttctcttgaaatttcttgaggaatatagaattgaagtaaagacatttccgctgaccggaaaatggcttcttctttatatccattcattattacaaagtatagatcaaaaacttttgggatgtaaaacagctaattagatgaatattagagtagcaaataaatttaaatttaaaatatcacaagtacaacaattttgtttatctcaggtaattgttaatggaatttatattttttgtcgtttattaaactgtatagatttatgcttagcgagatcaggtggttaaattaagcagttatgtaagctaatatagctccccttatactgctgtgcttcaatcctaatagcaattaaacacctttttttaatttgtttgaatttaaataagcaaagataacaaaatagatgtgaaagacagggaacaagaatgaacaagaaacaaggtccaaaggatctctacagaaatgttaattcgaaagtcaacctaccacttttttgaaactttagtttagattagtctcctattgaatatagaatgattcttacagaaaaaataattgaagaagagtagctatttttttttttcctttttttccaaattccttatcacttctccgaaaaacaaaaaatacgtcatttataacgttgagacatgattgttgattgttgaaatatttcgtattgaacgattcctattgatgaaatgaaagataataaagaaaaaaattagaatgtgtgttcagttaaagaaggtattacaaattgtagctattaatccacatgaagaccgcctcctgttaaagatcttattgtcattagtagtcctacaatcaagtggattgttttactaatgaaatataattaattaaaatgacctatggaagtagtaatacaatgtcacactttattattaagttaaacgtattctttgtaaaaaaaaattcatgtatatgtgtattcttattgaatgtccacttcaaattgtttaaattaagaaataaaataaatatatatattttttttcaggttttttttaaactgacaataaggaggtaaaaaatctttgttttatttttaaaaatgaaagccaagttttcaaaagttagaagtgaaaaacaaaaacagtttattaaattcaaaaaaaagaataaaataaaataaaataaaataaagatagatatttgatctgtcttgggtaataataaatattttgtggtaataaatatattccccttttttttttttacaaatatgacagaaatagatggtgaattcttttaatattttgtttgaaaaccttttatttcaggttacaattaaaatgtttttttttaaaaatctaaaagaaaaaaaaatgatttggtcaactatttatattaaaaacatttattaattaatatactaaaatatcctaatccttgaacttattaaaaatgtgtaatagcaaattacatgccttataaaatctatacataactaactttccctatctttaaggtatatacaaaagaatattctatgaagttatagaagaccttaaagaattacaagaataaagtagcttgtatttttaaaataagattttttcaaattaattttttctttcaaaaatatggaatgctatatctaccactatttcactatttttatatcattttacagttttctttataactatactcccaatctaaaataattactttaatttcttaccttaaactctattactaaaaaatcatcaacattatcatgtccaaaacatcttcatattctataactattatcacaatatcaagcaagaaacaaataaacatgtaatctaatattatatgtatagattaatatacacatatttttgtcttttattatacttaattaatatatatgccctaaacttctttatatatattcttttttcttctccttcttcttttcctctatatccatatattacatttagatacctctgttgaagtaaactgtttcaacaatatgaccatccttgtcacgtttgtcatgcaaatgattttctaatttcttaacatttatagactgtctttgagggaaaacacccaaagcaaaaggtaggacagcgaatgaagtgaccgtaatcaaccccagatttactaaagtttgaacacccgttgatttaccctttaaaaagttcttttgtagtctgactaagatcaatggtggaataaccataattggtgttgcattgataactctacttaatgcagtctcccccactgcgataaaagctgctttcttagattctccaaccgcgtcaccgttcttgtcaaaaacagtgataccttttctaatttcattacctctcattaaaaagacattaacaatacctgcagtgaccactgcagcgaatggaaccagtctacctaaaatcaatctagaattagcggacaagtttttcaacttgggaactaaactatttaaacccaaagcgacaccacaagatgcaccaacggctgctgcataattagtgacaagctgagaagtgctcatttttgttgacttattggcatttgcagaattgatagccacatttaaagattggttagcccattgccagaatatagtaccagcggtacctaggcctggtgtaagcataccaagtgttaccacagtatttgaaagaacacaacaggacatacggaatggaagtaaaacagtttcacctgtatccggatgcactgtggaatctaattgttttttagcatgccaaaactctggagttggtttctctatttgaccctcacggtaagctttaataatcttacgtgctgcaacaagatccttttcagtggtcaacaacattgacggatctgatatctctgcacaatgtctaattctaccccaataagtagacaaatcataacgggactctggtaatgatcttggacctggaactgatgaagccattttcttatttctctgtatgcagctttttgcgcaagccttagatgctggaactatttgtctagtattgtgaaaacaactagttattctaatagaacaactctatgtttttacacgaatacaatatctgtcaataataatctttcgtttctttattttatcgaagttaaaaaaaataaaaaatggcggaaagtcattattgttatatactcgatgagtttcggatgtctttatttagtcatttagtttttttttttcttttttttctttgtcaagatctcgaagttgtttcttttttcgtttctctccttcgaaattgcgttaccggtcaataaaacggaaaaccacaaaacaggaaagtaaaaaaaaaaactatttaaacaattcccacaacaaacagaacagaaccaaacaaaacaactcactcacccacttgcgttagtatataacataaatagaataacagtaatgataagttttgatctattacatgtttagaaacaagcattgacaaacctatcaaaaaaagaaaaaacctgaaccattttcaatagcaagagttgtggcatttgaacatacatatctatatactctaaatatttttaaacatgactctcatgtattgtaataagattacactatataatatcttttatttttactttcgaaaagccatatttaaatgattgtaaataaaacccaagagccaaaacatgcaggataaatgtatattcctgcgattacttaaaccttaacaacttgtccataccacatattcctctctattttgtaaatgaaactttcttatccataatccttgaatgatatacgtgttccttatttctttctttgtatttttgaattaacttatcttaactcgattttttgtttcttttttcttttctgtttttaattcactttatttttacagtgaggagtttagaaaatttttctttttcacttgaatcaaaaaaaaaaaataaagcaaaaaaaaaagagttagattttttcaactgaaaaaaaaggctaaaaagatgctcatcccaaaacaaaaataataataaaaaaaataccaaaatatattcatatgctttgaatgtaaccgtaatgcaaatcgcacttgtaagcactagaaaagcagtaacctgtcaaataactcccccactctcccctcctttcctcattttttaatataacctactctactatacaaagaataacatgtcaagcagtaataaatctcaagtgaaaatcagactttttactcgtgaaaaagatgaaactcttcatgttcaagatactccgatgtatgctccaatctctttaaagagatatggtctatccgagattgtcaaccatttattaggtacagaaaaaccaatcccctttgattttttaattgatggtgaattattacgtacttccttggatgaatatctggttaagaagggtttatcaagcgaaacaactttgaatctggaatataccagagccgttctacctccctcctacttatcttcctttaataatgatgattgggtcagctcgcttgacgtggataaagaatctaattacattgtatcgggttcttatgatggtattataaggacctgggatatgtctggaaaggtactaaagcaatatgcaggccattcaggtcctattaaagctgtaagagtgatttcaactacaagattgatctcggctggtaatgaccatactttacgtctgtggaaaactaaaaatgaagccttgaaacaagataacaacttggacaatggtctagaggatgacgatgagaacatcgagaatggtaaaacactagctatcttagttggtcacaaagcacctgttgtgtctgttgatgtttctatcaattcaagaatactttctgcctcctatgataattctatcggtttttggtcaactatatataaagaaatgctttctgtggatcctatggaagaattcaatagtagttctaacaaaatatcaacagcggcaaaaaagagaagaaaattgactttaaaggataattcaattagaagacgtgctcctttagctttattagaatcacacaatgctccagtagaagctgccaacttcgacttgaatgataacacagtggggtattctgtgtctcaggaccatacaattaagacttgggatttagttacatcacgttgtgtggatacaaagacaacttcctattctctattatctttagcacaaatgccaactttgaatcttttggcttgtggatccagtgctaggcatattacattacatgaccctcgtgtaagctctacttccaagatcactcaacaacagctaataggtcacaaaaattttgttgtttctcttgacacatgtcctgaaaatgaatatatgttatgctctggttctcacgatggtactgtaaaagtatgggatgttagatcaactactgccatgtatacaattacaagagaggatccatctgttgaaaagggtatcaatgataaagtttttgctgttacatgggctgaaaaagttggcattatcagtggtgggcaagataaaaagattcagttgaacaaaggagataatatttttaaaaattaatttattattgactttgctctccttacccacctctcccccagtcatcctggtctttaatatatgtattttcagtaaaatatatacgatatgtaaaataacccatttttaccctatgtaactcaatgttattatactaaaaagaatactacaacttaatctataaaaatttataattacacagttaaataaatacttatgtaaaagaactaatgaaaaggtatacatatatatactctgtattattaattatttatgtttataaaatttagtttagagttgaattacttttttttgtgtattttaggaaaaaagggtataaaataatgcaaatgtataaattcacttaaaatatgcaatggctaaaaattggattataccaacgatgaagaaacattactcgactcctccgctgagacaacatcagtgccagttctttccaacaattgatcaaaatctggacgttccgtattgtgatcatctttatggctttcgacatgatgctgctttttatcaacatgactgaatgatgtactggacctatgtgatctaagtttacgcaaagaattagtgctttttgctgcatctcctgggtgtgaaatgctggtttctatagaacgtaaagtgtccaacttctctaatgttaactctgcattatcataatgtgaatgcatcctcgctgtggagaatgatcctgcgtcacctttattatcacgttctaattcttcttctacctcttctgcgatttctgcttgtttcatcatagcagcaaaaccgaattgagatttgtgtcttaactgtgagccccatctttcaaagatccatggagttggaaccaaaactatacagattaaagcaaaaagagtcgaggcccatttaatcttcatattttcatacatctggatggtgaataatggaaaaacactactcatcacatatcttaacatattatttgcagccatagctgatgcaaccaccaaaggtggataacacgtagagaagtacatgataacactgaaaaaaattagaattaagccaaatccaaatggaacaccagcagcaattggagccatccattgaacatcacgcctcgaagtccaagcttgccagaatagtgcaactggtaatgcaatagaaccaatcttacatgataataataaactttctgggttgataggtaataactcgttagtgactggatctctgtgtcctctatatggtgttacacgtagagacactggatgagccaaatcgggtgttccctctggtgctttgggaaatagatatttacggtcaataataatatataacaatgaccctaaccataaacctaaaccaatacctagaaaaggtaaaccggaaataccaatatccattaaataaacaccacgatagataactgggtaagcttcaaaaaatgcgaataaaactgcaaagatgaaagcaacataaatggaaaacacaagcacaatcggctcaactactaacatttttaatggacggaacactgtgattgttaaggtaatttttaaaaattccttttgatcttctcttgtgaactcctttaatttaatctttcttttaacagctctctttctcaagataacacctttatgtgtctcaggcattagaagaataaatggataaattaaaccggatgcaaacaaaagaatccactgagaccaacgccaattttcgtattgacaagcaaaacctgcaataattggggaaataattggacccataaatggtgccagacagaaaaatgtcattgcaactgacatttcatcaacatcaaaaatatccataatagtaccggatgcaatagacatggcaggagatgcaaacgcaccagctaaaaatctacaaggtaaaataattctcatgtgaccactacttaaaccaactgccatagtgaaaagacaggacaaaggtaaagaaattacgtaaattggttttcttccaaaaacctcactcaatggagcaccaataacagtagacaaacctaaaagatagaaagttaaccctgcaagagctaacgtttggttaatatgatatctagcaaccagctcaggtactgaacaaacatataaagaggaacccatggagacgacaagacaaaggaatgccgcggtcattgtagtaaaccattttttccaagatggccagttatgaggattatccatatcacctgggccatcccaatccaaactttttggatctataggttcatcttcatcaggtgaattttcatcaaaagattttttctcatcatttgacagagtaagggaagaattttgggcgtcactattcgctggtatctctttatttaaacgtggttggttatctgatatactttcctccacatcagtactattttcagcgtcattaccattacttatattgcattctaaattattgtgacctgtatttatattttgatgattgttgtctgattgtttgatttgaatgtcatcattatccacaacctctgacattttttttttttgaataatgttgagttgccctatgtttatcactttaagaagtttattttatcgattgagatgttagtagtagaagggtagattagttgcaaaggaagctataaagtacctatgaacgatgggataaaagcattctaatatatacatatatatgtgtacaccaaaagagatattgagagaaaatgatacaaatgaaggtaagccccaaaagaaaaaagaaaggacttgatatctaatagcagattggatattctacaagttaaaaaaagaaaactcctagattgtctaaatctgattcttatatatgatttgttacttcgagtttattttagcattgtctgctttcatgtttaattccccgaagagagattattttcatgcaatatcgcggaaataagtggacaaaagttagcagcactgtcagagctattgtgttttgttttcctcgagatcaaaatttcccttactttttatttcttttcattcggggaatttagtaatttcaattctttaatatggcgtataaaatgatattttgttttgggacaattgaaggggactttttttgtggaaatttattttctttttttgtttttttttttgatctgtaaaacaatatcctcaagtcttttttttatttatttaatttttttttttattcttgattttttttaggtgtgatttgcaaaacggagaaatattagggcttggttaattattcttttgttaacagaactcattgtttaataatcagggttggcaactttgaattactaggtctttttgtttttatgttttctcatttcttttgggttctcctccttttttattttttttttcagattttttttctttttcataatgctgttgctcgagaggacacatgggagatggatagagtgacgtgagatgagttgagccaagactaaacgacttgattagaaggtgaacaataataataatattaaaaaaaaagatgattaaagaaatacactgccaagtactaccgaaattactttctcattattattattatcgacatataatgtggaagataatttcaaaattactcgtaccaataaatcgattacccaaaatggaacaaataaagaaaaaaattatagttatagtgggcactacaggtgttgggaaatctgatctctccattgagttagctaggagatttaatggtgaatgtattaatgctgactctatgcaagtttatatagatatcccgattatcacgaataaacatcccattccagaaagaaaaggtatcactcatcatgtcatgaaccatgttccatggaatgaggagtattttattcatagatttgaaaatgagtgtctagctgcaattgatgatatccataatcgaggtaaattacctatcattgtaggaggaacacactattatttacaagttttattcaataaaatcacaccttcaatggaagacataactttggaggatgaaaataacatcagtgatttgtacaaagagcatcctattttaggtgaagaagggaataaggattctagatacgaattgctaaaacaagtagatcctgaaattgccatgaagtaccacccaaatgatgaccgaagagtactgaggatgctggaaatattttatatgacaaataaaaaacctagtgagttattcaaaaaacaagagttagtgttaaagtatgacactctatttttatggttatacagtgaaccaaaccaattaaataaaagactggacaatcgagtagataagatgttacaaacaggaggtatggacgaaattcaacaattatacaaatattttgttaatcataaattgacacccgaacaatgtgagaatggtgtatggcaagtcattggttataaagaatttttaccttggttacaaaaaccagaaaataacaaattagaagatagtattgaaagaatgaaaataagaacgaaacaatatgccaaacgccaggtcaaatggatcaagaaaatgttgataccagatatcaaaggtgaaaatatatacatacttaatgctacctatttaactaaatggaatgaattagtttgttccagggccatagatatctcaaatgaatttataaataacagaaaaattacatctgaacaagctccttctgaattggtagagctgatatccacaaaggaaacagttgaacgaaagaaaaattcggattggcaacactatgagtgtgatatatgtaatgactcagatggcaagaaactgatagccattggggagaagaattggcaaattcatttaaagagcagaagacatagaagcaatctgacaagaggtctcaagaaaaaacaatatgaagaatggaagttaaaacaaaagattaatggtgacttatagaaatataatcatattcattgttttaatcctttacatatctatatgaatgcatgttgtggtataagaaaatatgaataccatattctaatccagtgattgggtatttactttttcatgttctaatttcctagtatgaatatattcattcacctcattactgaaattattgacagagtttatcaaatcttcataaaatttggaggcatctatgatgtttgatttaacttgttctaaaagttttaaagaaaatttaaattcttcaatgtaaagatcacgaggagtcaatcttttaatggttgcatcattcctatagttttctttagcctcttgcttcttcaaggcaattgcagaaatcaaatcttggttaatcttcttttcactttcaataaataacatactctctttaaaggtagcattaagatgtgataaatatattgattcaaaattacttacactattgcttaatctatattcatcaattaattcaggcaatatcgagttatcccattttttattttcaagttgtgaaatatatgtatctctcttttctatggtatcattaattttttcaatgaatgggtcattatttacatgtaatttaatatcggcactaattaaatctttatcaatggtttcaaaaacttccatagttttcatatctacctccaatccctgttttaaatattgtctcaacatatttaatttatcccaatacggtttattaactgtagatgattcaacgatagttgtaaccaatgatccatatttatgacgaaattttctatccatttcctcttcatcatttagcattgtttcaatgtagtttagttgattttgaacattaatttgattttgttttaaatcagataatgcatatttgtatttatcaagttcttcaatcggaattgaatgtatgttagctaatttaatcacagatgtatcgttagttgttatttcgagcattttatcttttaatagtttatttaatgcgcacaacggagatattattctttcctggatatgctgttgttgtctttccttgaatactgtcacatattccataacttctaaaggtaacagtttataaaacaacctatctatttttttgaaatcaattgaaatatttttgaatagtgtttctctcatattaagatctatattaaccatacttaatggttctattaaagacaccgggtcagatggtacagcttgatgataaatgaaatcattatctctttctacatcatgtaaggattcataaatctttgatctaaaattatcagatgtgattccacattgctccaaacaagttgatgcactttggtaacaaaaaatctcaaatccatatttttgtcttgtatggtagtccttagccattctgtagaatgtaactgcctgaaaatataattttttatcctcaaatttatcgatccaatctgatctaatcaaaatgcttttcttaccatatcttatcgtatcttcatagaattgaacaatttgagaagacatcttgccaacaattttatccttcaaattatctttaattgccttttgccaaaaacattccattgcctgtgcgagcatcaaaaatttcaatgataataaggtgggggtgtcagctactggagcattggaggatgatagattcatttcttgatctcttgatagattagaattatagtttattacaataaaatttataatgattgctgataattggaaatatttacattgttttgtcaaatatgaaccgttgttagatagatttaaatcaatagccctcagactatacagagacgctatattatatagtacatttacttgatcccattgaaaggaatattggtttgaagagattgaactagtagaaagagtttgataccaagtaaaaccaatttgatctgatgggaattttttaattaaattatcgatcaaataataataagagacgtggtcagttaacgattgatcagataaatcagtgtctaagatgttatttctcaattgatcaacaaaatttaagtcattttggaatagtgatggattttgtaacgatatcttattgatcaaatcgcccagatttttaagtaaatccaccgataaggttctcttacatggaatagccaaaaattccatatttacagaatacaaatatatatcccccaccttcttttattacttctcttcttctgttttaacagttggatcttgcaagcactacttcgaagatagaagttgattataagaatgacaaaacgagatcattcccagagaatagttacattacggcagttatttcttgaagattcctctataagttttttttatccattcagtttactttttattatctttagttacagtttgtttcccttacacattgtcaaattcccacgctatgcataataatgcttagtcataaatgacgaggtatattttgtctgtttttttcctcccaaaaacaaacaaacaaacaaaaattttaccaaaagatatattttaatctgttgactctgatttttataaatattttttttgtttttgcataaaccctataggaaatttccttatttgtagaactatcttgcacaacttttttcaaagcctaaccaataaagctctaaccctaggagaaataacaaaaacgacaaattgtagtaaaattgcagagaaaccctcattatttttgtgatgaacaaacgaattcttattctcgaaagcactaagaacgaaataatttcttcaatttttcttttgattttggataatttttacactctattccattctattgtattttttttttgtttcctcatttcacacttcgaaagtgaagaaaagaaacgaaagaaaaagaagaattttaactgtcgacattagaagcttaagaagataaagagctttcagctgaataaatttggacccattgaactttcccagcactgcgaaataaaactgtaacaataaaatatctcaaaaaccaatttatactatacagttagccatgccaaaatacacaattgaggagctattgcaattgaaaccagaagaagttaaaccagtcaatttcgatgctgtagaatttaaagcattgatcgaaaaagtcaaacaattgcaagccttaagagaggaggaataccataatcataaccatcaccacggccatttcaatagaagaagatcttctcaccaccatggtagaccaaaggttaacaaacataagccaaaggttattgttgatgaagaaggttgggctacttttgaaccaaagaacacatctgcagttgctgaagaaccagaagaaggcgaaaccaattccaatggtgacaaaaagaacagatctactgaatctttagcccaagaaacagtcaagattaaaccaaacaacaagaacatctcttcctcaagacctgcagataataaagatatcatcatggataaacaaatccatggtttcaatacctttgctgccttaggtaatgaggatgatgatgaagatgaagaggacgaagaagaagcctaagtaagacatgaataaataatataattatataaaatgatttataaattatttttttttttgtccattcgaagtgagaaatactaataataatactaatgtatatatatatatatatatatacgtattatatatttatgtctgaaaaaagatatcatttgtataaacttttgcataattagcaaaacattttcttacatccaatattttgcttacgtgagcataaaaggaaaaaagaaatatttttattagtaccgagatgttaaaaaaaaaaaaataaaaatctatctctctctctatctatctatatatatatatataatatcaaaaaaaatctatcatctgtatgaagcacttgctcagaacaacggtaaacgaataaaagaaaaaattgattgttatctatatacaatagtaaataaaggtccatcatccattgaaccacactaaatgaattcacttgtaaaaaagataatatcattagtatttctgttctatttcccatctttagtctgggcacaagattactataaaattcttggagtcaatagagatgcgaatgaaaaacaaattaaatctgcatatcgacaactatctaagaaatggcaccctgataagaaccccaatgacgaagaagctcatcacaaattcattgaaataggtgaagcgtatgaagtgttaagtgatcctgaaaaaagagctgtatttgataaatatggtgcagatgggttaaaaaacggtgccggtggcggtgctggtggctttcaaggaggaaatatgttccatgacccatttgatatctttgaacaaatgtttggtggtgcaggaaatggtgcccgtggtgcacaaagaagacgcggaaatgatttgattgcagaacatcatatgccattgaaggatttttatttaggtattaaacaggatgtgacattatcattgaatgatatatgtgaccattgtcatggtagtgggtcagaagatgggaaagtgacagtgtgtcccgattgtcaaggtcgtggtgtacagatccagattatacaaatgggtataatgacacaacaaattcaatcaatgtgtggtagatgtggtggtacaggaaaaatcattaagaatgtatgtaaagtatgcaagggtgcaaaagtgactaagaaaaacaaagtcttccatttaaagacaaatggtgggattaaaagaaatcataaggttagaatggaaggcgaagctgaaaaaagtccagattttgatacacctggtgatttatatttcatattcaaagaaaatgaattaaataaccttggctatagaagacgtggagatgatttatataggaccgaagttattacttttaatgaatcaatctatggtggatgggaaagaactattgaatttttgaatcctcaaaaacaagttaatctaaagagagatgttaataagatcacattaaatggtgaaattgagaaaataccgaactttggtatgcctcgtgaaggtaaaaaaggttttggtgatttatacgttgaatatgctgttattgcaccggcatataataaagcaggaaccacagacaaaaagaaaattaaggatgagctataagaatcaagtttgcaaatatatataggtgaatttatataattctaataaagtcaaaaattgaaaatagtgcaaaaaaaaaattaaagaaaatagtaatggatacatcgcatatatatacgtaggaatgttgaaagaaacatgaccaattgtatcacattaaaaacctatttaaatggaaggaaagagaaaggctttccctcgtataagttttcaacaattggagatacatctttccagcataaaaaaattatacattaatctaccatgcattgtaatgttgaaacaaaccaaacaactaacttaagggcatcgaacccaggaataggaaaaaatctctgtaagtgacgccgttcagaacacatggcatagttgtttatctgttttgcttctggctaagttggaacgtaatagcaacgaggaataaagaagattatttcaatataggaaatgtatgaatgcgagagtagttttaatttatagaacttgatcacaatctgaaatgcaacagcagataaacacatacatattgtatggtgtccttagagtaaaacagaagaagaataaaacaaaaaaaaaaatttttttctcgacaactgataccttctatatgactgatcgtttaaaatgatataaaccaaaagaaaaattaggttttgttattttgttttcttgaatcttgattatagaagaggaaaaaagtatttaaaggtgataaaactaaggaaaaacatacaatccttggtctgggttattcattctaatcacgctgtccatgttgactttgtttcctatgcactctattcaaaacctttctcttttgctctcccactttgtgaagagaccaaaaactgatctcttccggattaccaagcttggacatacaacacctccatatgtcttattaagcctaaatggctggaagtagaatgaaagggaaactggggggaaaagcaaatatatctttgcttctttccttcttttgttcttttctgcctggtaccagtatatatacatattttttcgtgtatatattggtaataatctagattaagagtagtttcacactctgttttctggttcgcttcgggtagacatccgtcagacatatctagtatctggtatggatagacatgaccttacttgttcttcactaagtaatacaaatcaaccatgcaacaaggttgacaacaagcgaattgtatacctgacttaatgttttgacaggacattgctgtaacatccgttatttgaatctctcttctaccgttttgtatagccaccgtaactattctctattacgtgttcttttagtcatattttacttttccagagtcaacgaaacccacagaaacccctgtcaggataacaaacggaaaaagaaatcacaacattagttttctgttttttttttttttattttttcgaagatgaaatttttgaaaattttcaaagattctttcaatttttcttttctttttttcttttttttttttagttgattttatttcctttgtagaagccatcgattttcatcttgtaaaattttactacacacataaaaaagaactactatcctcatcagtagacatctaaaagacctacttctctttagcttaaacttaagtaacctgtcaacaccaaccataaaactatactaacattcttctactttcttctccctctccctgtttttgtctttccttctaaactaaaataccaacattcacaatgtccaaacaagtgtctagtgtcttcgataccatcttggttttagattttggttctcaatattctcatttaatcaccagaagattaagagaattcaacatttatgcggaaatgttaccatgcacccaaaaaatagctgaattagattggactccaaagggtgtcatcttatctggtggtccatactcagtctatgctccagatgcccctcatgttgatcacgatatcttcaaattaaatgttccaatcttgggtatctgttatggtatgcaagaattagcttggatcaacggtaaacaagttcatcgtggtgaaaagagagaatatggtcctgccactttacatgtcgaagataaagataatgatctatttagaggtattgataactctactgtttggatgtctcatggtgataaattaaatggtttaccaacaggcttcaagactatcgccacttctgacaactctccatactgtggtatcaaacacgaaactgaacaaatctacggtatccaattccatccagaagttactcattccactatgggtaaacaattattgaaaaactttgctgtcaacatctgtcaagctaaacaaaactggactatggaaaactttattgacaccgaaatccaaagaatcagagaccttgttggtccaactgctgaagtcatcggtgctgtctctggtggtgttgactccaccgtcgcttccaaattaatgaccgaagctatcggcgacagattccacgctattatggttgataatggtcttttaagattaaatgaagccgaaaccgttaagaagactcttgtagacggtttaggtatcaatttgactgttgttgatgcctctgatgaattcttgggcaacttgaaaggtgttaccgacccagaaaagaagagaaagatcatcggtcacactttcatccatgtctttgaaagagaagctgaaaagattaaaccaaaggatggttctgaaattcaattcttgttacaaggtactttgtacccagatgtcattgaatctatttcctttaaaggtccatctcaaaccattaagacccatcacaacgttggtggtctattagatgacatgaaattgaagttgattgaacctttaagagaactattcaaggatgaagttagacaccttggtgaattattaggcatcagccatgaactagtctggagacatcctttcccaggtccaggtattgctattcgtgtccttggtgaagttactagagaacaagttgccattgccagaaaagccgattatatttacattgaagaaatcagaaaggctggtttatatgataaaatttctcaagcctttgcttgtttattaccagttaaatctgttggtgtcatgggtgatcaaagaacttatgaacaagtcattgctttaagagccattgaaaccactgatttcatgactgctgactggttcccattcgaacatagtttcttaaagaaagttgcttctagaattgttaacgaagttgacggtgttgccagagttacctatgatattacttccaaaccaccagcaactgttgaatgggaatagatggattataaaatcaaaaaaaaaatagagattatacataatatagaagctaggggagtattaaaggagttggattatcttttatttcctaatagtttttttttatcctttctatattattttcattattgtttgttcctgtaatacatttatgtttactaatactagttgctctattgtcataacagaatgtaaattttatatacctatatctgtctatatatatgtaaatatcgaaatactacatatataattttaatatgtatactattatcttataaatatatttttgaataatactatctacaaattctattagtaatactgcttttgttaattgatgatcattcactaccaaaatatcttgtttaaatattgtggttgattattttgctataatagagaatatttgaaaaaaaagaacaagtttaatcatctattgaaaaaaaaatataacctcaattgttctaatagtttaactatctcattgtcaacataaatcaatttataaagtccatattaaagcatatatcttcaactaattgcccatggataaccgtccaagtaaacaagtaatcttcttaaagaataaaacagtaccagtagataaatacgaaatagcctcaaagaaacataacttcgacaagattaaattcatcacattaataaaacatagaaatcgtcctactgaattggtacagctattcactgataacaaatatcttaacaatttaaaatatataatcattacgtctcagaggaccgtagaatgtctttatttagaagttttaccaaatttgagtgagtctcaaagaaatatattgttcaataaagtcatatacacagtaggacctgctacatctgaatttctaaaacgttgtggttttaaaactgtattaggagaagacagtggtaatggaaataatctagcagatatgataatggatcaaataccaccacccaatattcatggagctaccgcaaacaataacaacgaatttttatttttagtagggcttgtcagaactgatataatcaaaaataaattgacaaataaaggctatcaaatcagggaaattattgcttatgaaaccgtagcattggataataatttagtaaaattgaagaatgagatgaaatttgatacaaatacttggatcgttattttcagtccacaaggaatcaaagaaataataccatatttaaaacaaataatacttctggataatctttttaatgtcaaaattgcttcgattggtccaactacggaagcgtttttactaaaacataatattaaaccgcatgtaactagtcccaaaccaacccctgaaagcctactaaatgctatttcatcctatgaataactatcaataattaacaataagaatatttgcctatttactggtatgtgtatatacgtgtatatacgtatatataatattattccattctcttacctgatgatgatatatttggacggccaatattaaatgtttttctaatgccggctacacccccctcaaatctggaaaggacttttgatattctatcagtatcaatcaactcatgaactttgatagaatcgaccacaaccttggttcgcatttgtttttctggttgatacttcaatctagggggtagaatccaatctgatcttctatttggcacttttactttgggcactaatgactcataaagatccttgatatcagactgttcttgatactgaatactttcattaattgatttggatccattacgaccttcttcataattaatacacgtattctcattttgaaaattgatattcttagcactatttctactttgattcaaattcttaggtgcttcattacttaatatttgttttcttagttgtttttgcttttgtattttttctaatcgtttttgttcttgttttttagatatcctagaagatcttcttctataaccagtagaattactatcaatagtggccgaaccattgtcagtactaacatcagaagtgtcaagaatattctcctttcgtatgtctgagtctacagtgtttattgtcatgttataccctgaagtattatcataaaaatcttctaactcatcaacttcaacaatctctgaatttgagtccataggtgtctgattaccattattattaatattattattattacttgaagtttgtattggattattcaatttatgtaaatattccaacgatgatgaatgagatggtggtggtgtaacagtagcttcaatagatgtggtgctcgtattattaagtccagcaataatagtgtcttggctatttctattactatcactttttgtagaggtagaagatatagtatcatctgcaccgtttagaagtccatttggttttccaattttctgataatattttgaatgatctctatattttacatctaacatatcaaccctaccactgtctgatttacctctcttaaatgtattaataagaaaatagtctgtatatgattcaaattctaatggaacaatatcatttgtaatatgttgaatttttatattaatatcttgtgattcgttgagcaataatttaatctctgatatataatcatatttgggaggacttcgaatagtttgagaccgtgtaatcataatataataaaaaactcgtgaaattaatagcagtgcttttctatcgcttcttttttctattcttattatatttgttaaagtatgctgtttgcgttggtttttaatgaatgctaaattattagaatatataagctttttctatacattttccaacaaataaaagaactttattatgaataacgataaactttttacttctatatgtgatgtatacatttatttaattttcttatttactttttattttatattttccattaatttttttttactgtcaccattgacttgtccttcctttaactatttttgatttttcacttccgatgtgggtctaaaaaagaaaaaaatgttaaaatgtcacacttgaactgatttgattcatagtgtaaatactttttatatgaaaatatctaacaccaaggtatttatcatatatgcttataatttattagagcatgggtgtaatcatatatatataaatattcttttatctatccttttaatgcttgataataactaattatttaattataaagttatattttttttccattatttataatgcaccgatactattcatcatatccagcaaatcatcatccagtgtatttttacttgattctcttacatctctctttatttctaaatttattgctttcttatcattattcttcaaattagtactattagattgttcaatataatgtatccagttgcagacttgtgtgacaaatggtttagaatttggaataaagtgacttccagggtgctttaataatgttcttttatcctctggccatgtgttataaagcttcataactcttgcttcagaaacaacagcgtctaattcaccttgaacatgcaaagaagctggaacatgattgtctttattattaatcttttcataaggggcttggtatttttctggttctaatctgaacccactaaatgatatgaaaaacttcaacggtggttgttgtttggaatctaaatttaaaatattatttatatccatagtgatatagccacctaatccagcaccttgagaaaacccgataataccatcaaaaggaccgttttcaataatgtagtcatgtaagtaattgaacgtattctgagggatatcgtattcaaggattgcctttttaccagaacccgttcttacccaccaaccatataattcagaagtgtcattatcgatatttgtattaaaccacctggctacgttatttttatcgattgtttcttttgattcatcattattagtattagcatccccatgtactaaagtactcttatctacaatttctggaccacaaggaaaatataattcatagcccattttcttcaaagactttcttaatccaccagtcttttgacggaagattttgtctaattgcacaaatccatgtaacattaatatctttttggtagtatccattgtcattttattttattttattttattttattttattcttcttactttttgcttgattgttttgttattttgtagtgtttattttgacatgtaatcaattatagtatcattaaataactaaatcatctacttctttagtttcgtgatgtttattttcatctttccttaaccaaggagaatcagttgtttaaagagaaatgactatcgcaacaaaacaaacatcaatagatttacaataaaaagtaaattaagtgctggcatgtaattatgatgatttattgattcttttatgctctttcacttgatctccttcggtttttttagcttttttaaatctttgttttttcttttttctttctttttcttcttctgttttcttttttcctctatctaatggttttttgtcaataagttaacttttctcgaaagtacactttaccaagtttccatattatggtaataactgcctggtcacaacaaggtgtatttgcaatgattgttaccctaatcgcatttttagatattttctgaaaacatttttttcagaagacctaagttatgcagaaaagaggaacattgacttatgtaaaagtaaagtaatttaaaaaaagaattaggactaagatcctatgcacttttaaaaaaaaaatcttcagtttcttaaaaattggtattattccctttattcatagacaacttatatttttttgttttttgtcttttttattagatttgaacacataaaatatttgatattccaaaacctgtcattcgaataaaaataatattttcttgacaaactctttcaaagtaatcctaatttgcattcacagtgacagttcttgattggttatattattacttaatatatacacgcatatgtatatgtatatgcatgtgtgatagtatatatattttatatggtctagcactttttcattatatagatcctgccatataaaaatattattattttccaaccctaattagtttagtcaatgatctagcatctctaagtatttcagaatgacaaccctaattgtacatattgaatttgtcattgcacctctacccctccccaaaaaaaaaaaagaaaaaaataatttccctatagaggaattttgacaaaaaaaaatcaaacaaataaacctcgaaggtctcgagaaattctttggattaacttttcgttcttttcttttcttttcttttcttttctgaaaagcaagacagtggtgaataggttaattgggacgagctatggaaaaaaggaaaaaataagaattactttaaaggaaaaaaaaaagataataaaaaatgaaataaaacagagatgagatgagataatattgaatctagttgctgtcatttatatgatggttgacactgtaatatttttgtgttcggtttgtaacatataattttaagggagatttggtatctgatacttgtttattcgcataaagaagttaacaaaataaaataaaaaaaaaacaaacaaacacaatattcatattttcaagaacagataattacatttaatatgacacattgttctcatttgaatctcctattcaattcaaataatgaattactgaaaacatataaccttgtcaaagcatcaataatcttcaatgataaattaacatggaaagataaaattctttatttaatggaatgtcatacatgccatgaatttaatgcaggaacaaattttgtttgtctacaatgtgatttttgtggttgctgggataataaacattttcaaactcacgcgatagaaaatagccattcgtttagtgtaaatagtagtaatggattactcttttgtttctcttgtatggattatattgtaaatgatcaaattatgttggctgataataatctatcattggatgaaatttccacaattttaaataaatcacatccgccagatcaaattaggagagatggtctatatggattggtcaacatggggtctacctgctttatgagcagtgtattacagatcctaattcataacaaatatataatacaaaagtttcttagtcaggatcatgttacatattgtactataaaggatgggcgagattgtatgttatgtgcatttgatacaataatatcagaatggtttggctctgtaacagaaaataataacaacgatagtcatgatgggtttttaactttgttgacttgtgtttggtctataaataaaaactatgctggttattcacaacaagatgttcatgagtttctacaatttattctgaatcaattacatatggattatattaaaacatcttccaatggtgctaaacttcaaaaggatattaaaaataattctgacactctcaataatagtaacaatgatgatggtaagaatacgaataataaagatttcaattcttgttcatgtattgtccacgccacatttaatgggactttaaagagttctatagtatgttctgaatgtgatgataattcgaagacagtcatagaaccgtacttagacctatcactagatataagtggcaagaaaacgttatatgaatgtctagaaagtttccataaaagggaacaattacacgattttgaatttcattgtcccaaatgtcaaactgagaaggacccaattaaacaattgacaataaatcaactatcaccagttttaatatttcaattgaaaagattcaagcatttaataaatggtagtaatgttaaaatcaatgattttgtatcatttcctctatatttggaaatgagtaattattgttatgataacattgattatggtaacagtaatattaatggtaataatggtgaaccacggttgccaacaccacatattatttatgaattaactggaataatatcacataagggtactgttaatgaaggtcattatacagctaccgtaaaattatcctcaggtcaatggttcaaatttaacgattcaatgatatctttactcaaagaagaacaggttttacaagaacaagcatatttactattctttactgtgaaacaaatttctaaataagatatattctatacactatatacagttttcttttattctcttcatgattacatattgcattaaatcctattgcattaaggaagaaaataaaaggaaagaaaaaaaaagtacatataaaatcagtaggttaatttaaattattacactttctataaattaactaaaatatgcacagaataattagatacaaatgttttataatgattaattataaaaatcattatcatcttcagagtcactattatcaagatttgaatatccaacaccaaaattaaatttagattgtatacctgaccttattcccttgttattagtatattttaatcttctttcctctctggaatcatcatcatcatcttgatttatgatcaatcgattatcattatcctttaatgcacctacttttaccattaactcttcaaaatcttttaatgtagtattgttaccacctaattctaataaagtaatcaaattctttaacacatcaccattataatatactagtaaagttggacaattattatccggataattttcaatagctctattccctaaaatctctacaaatttaatttctttatatttgggtgccatcttttgaaaaatattactcaatattctactttgtagtttactttgagaagacaaatgaacaaagacataaacaccctttgatgaatcatgttgatcatcttcatggtgatcagaaaccatcgattcgctacctttacttgctaatgtgacttctttattgtattcaggcttgttaatgtaatacacatcaccaaacttagattttgactgtaattgagccagctctgccattcttttcaatttatattgttgtaagaaatcctcatcttcatcatcctccagttcttccaaatccgatagatctttaccttccaatctattttcatgttgcttaattaatgcttcttccagtgcttcttctatttgttgcgttggagaaggtggtctctccggaatgatccctttagctcttaaaatatcattccattctgtatcttctgattcgtccacttggacttgaaacatgggttcgttctgcattttgttttgtatatatatgtatatatatctgcttgaagtatattgtgtgagtattcaggcctatagtaggttagaaacggaaataattgctgtttgaaggtcaatatggttgtaatgttaattcaattttataggaattattgttttttttttttttttaattgatgttgatatgtacttgaattttttgaaatcttcaagaaaaaaaaaagaaaagacaaaaaataaataacaaaaggaaaaaaaaagtaactgaccaaaattaatcaggaaactttttagagggaatatatataccaatatacaataaaatatatattttacgtatatagatgttggtgtaaccttggtcttattttatctttgatatttcgcttataatcaagcatataaacattagcaactataagaaagtactgcatagtgctatacatatatatataaagaatgactcagtctacacaatattatgagaataaccaagatgccaatatcgttcgtatatttttaattagacatggtcaaacagatcataatgtaaagaagattttacaaggacacagagatattccattgaatgtgaatggtatcaaacaatctcaaagacttggagaatacatcaaggaacaaaacatcaaatttgataaggtttattcgagtgatttaatacgttgtcaagagacaacaagagaggttttgaatctgtctaatcaaaatatggtgactgttgagttgaattctgatttaagagaaagattcatggggccaattgaagggatgcatgtgaatgatgctgagaaatatgcagataagcatggtaaggaatcattcaaagattttggtgaaaacacaacaatatttttagaaagattacaaaggggcattagttcatcaataaatgattcaatctcgaaaaataacaaaaatatagcattagtaagtcatggtggtgcaattagagccattatgggatggttgcagccaaatgttgaagatgttacaaagatcatcgtatttaatacatctgttactgtgatagattatataatttcagaaaagacattcaatgttagatttatgggtaacacaaatcatttaggtgaaggtaaatttatggttagtgatttgagattgcgttagatgaaaactaatagtagtaaattaataaagaaagaaagaaagaaaaaatatagtaaattaaattgatacgaatacacagcattagaacgtgtgagtttatacaagttatacatgatatacccgatgattgatatacatttatagatatatagatatatatattttatacatagaataaaacacattaaaaattactagtactgatcctcataacttacggttattgtctcaaattggaaaaacagcaaaaaaaaaataataaactactttcgtagaaaagaatacttgatctacatctgtgcaccactgtataattatctttctcttctaaaaataaaaaataagggaaggaaaaaaatcaaaaacaaagaagaagaaaagccttagaacaataccaaaaaacacaaaagaactacacaaaggagaaggttgccttagtcagcgtccccttttttttgtttttgtttttgtttttcttcctttctttttccaaatggtttacagtggaagttgtaatacattcagcactacatataaagagacaaatgacagtagattgaaagacccacaaggtttggtttgttctacagggcgactagtagttcttatttgcattttttatctgtgttttccagaaacattcaaataacatctaattaggattttattctttgccgtcaggttagttgaagaaagaaaaaaaaaatatgtggagagctattgttaatgcatggaacggagtagatgattctaaaacggcttcttcttctggagaacacccacaaagaacaccagcaccagttctaaagtttcaagatgtggtagaaattgttaaaaagaaagacccaaatactgtcattgtggatgtcagagaaccgggtgagtttgaagttgtacaaattccaggctcaataaatgttccatatacatcacatccagacgggttttccttaaatgaggacgattttaaatcaacttttaaagttgataaaccatccaaaaatcaaagattggtcttcctttgcgctgctggaagaagagccgcaggggctgaaaatgtcgcttgtgaaaatggatatcataatactgctatttattctggttctatgaatgactgggttgaaaaaggtggtgataaattagtcttttaaatatatacatgtatgtatgcgtaattgttaatgaatgatgttttttttgctactttacctatttaaagttatatctgattaatttttacaatatatatatatatatatatgagccaattttatttccttctttcttttaacttgcagtttctatttgtttattgacttatatttatttgaaagaaaaaaagaaaagacagaaatgcatatgaaatttctacttttatttatttgttttctttttatttttattttttttttatttagtgaaggatgaaaattaaagatgatgaaaaaaagacacaaaaaatacatgactacatcatctttaaatctattatgtccttaagctatgtgtagacatttgaattttgacatacaacaaaaaatacacatcgcaatctcattgttatcattgtcatttgtagacctgaaaaaaagctaaaggaatttgtctttttttttttttttttttcgaatatatctatctttcactctacttcattctctatattcagttaattatgtttaaattgtccaatattaaacctatcttaaataaacaacccttttttttaagatctctttcaacaaaggctgctaagatttataggttcgaagatattaaacaacttgtacagcatccagatagcaaaaaaatccttatcgatgtaagagaaccagaagaattaaaagattatacactaccaaattcgatcaatatccctttaaagactgctcctggtgctttaggtttaaaatccgaggaattcaaagaaattttcaaatttaataagccttcaattgatagtgaattgatttttttatgtgcgaagggtgcaagagcacaaactgctgaagaattagctagatcgttcggttatgaaaatactggaatatatcttggatccattaaagaatggctagaaaagggtggcaaagatgctgtccctaaaaaaacgacaaaggaggataaatgaacgaataatgaatttaatttaattttatgtatttttagagtttgtgtgtgtgtgtttatgattgttatccttcttccgtgtttcccatctcctctccctttttacctcatataactataaatacatatacgtacttatatatacatatatatgtatatatgtatattattgtaaataatcatcttcatttacttctctttatctcaatttatctaataatcaataatcaataatgtttaataattatttgcaatatatataaatatatatactttctttcctctctactttctgttataaaattcaaactgtttaaattctttacccaatcttttctttctttttctttccatgaccttttcacgttgttttgctttcatatggtcgaatttccatttctgaatgattttacgtttctcagatttctttaaataatacctggatttattatttgaattcatttctctttcataatccctgataatcttattctccaattctttgtttttaatactttgtaatcttgatttcattgatttcacttttctctccatatcttctctttcttgatcgctaattttattcaaaaatttacgatcctctaataatgcttccatctctgctatctctttttctctgtattcatccaagaattgatagcgtcgtctaatcaccgatttatctgtatttacaccacctagagctttattgaatctaatgtcaccatataatttagagttttgttttaatggaatctctaacccaggaatttgtcttatctttgagactggcttttttgatgaggattccaccggagcatgtttatgtctttttctagatttatttttattctttcctcttcccatatcttcttcctcttcaaagaatacaccatcagaatctgactcagatgaactgtttgcatccgaatcattgaatggttcctctttataagttttcttatttcttgccgaattttcttcgttgtgtgatctaactttcaaattttcaacgttcactttcctcctttgttgtctttcttcctcagctaacatatcttcagcttttttcaatgaaccaaatgatatggtctgtatttcatcatcatcatccccactgtcatcttcttgatcttcatccacttcctctgcaccactctgacttaaatcgcccttggaacttttatttcttcttttcattattctttctagtgtcttacctaactctttttcatcaatttcttcatcttctgaatcattgttgggttgcaaatttttaaaataatatgacataatgttaatatatatatatatatatatatatatatatatatactagaggtgcgatttactaattttttattttcaaaaaaagtatacaacaaagaaaaaaatgtaaaagtaccttgattattttatatgtgtttacctttggatattattattattattactatgtgtacgctagacgctttagaagtacgataattatatatgtatgtacaattgaaagccgtaagttttacatcacaatttgcgatgagcaaaactttcttacgtttttcattttgttggatttttatttttcattttgttggatttttatttttcattttgatattttttctttaacttaataaaataaaaaaaatccaaaggtagaaataacaaataagaatagaaataaaaatgaaaatttaggaattgattaaaacaggattttaggtccatttctattgattaaattatagcatggttggaggactttaaccatcgctaaaaaatgctcatgattgatcataactcatcatggatgttagaatctttgttttttttaggtttttggttactattcctcttgacttttttattttttttagtggaacctttcttcaacacatttaaataattttcacgatcactaaatggaccctctctaggttttatctgaaattgttcaaataaaaattctactagattctctttgtttattaccttattttcatcatattcaattatggtatcgttatcaaagtctaaaataatcatacgagattgatttggaacatcctttattgattcaatcaatttatttaattgttgcacaatattcggatactctgtataaaatctggtatcttttgagagcaacgatatttttttattatagatcgagaagaattgtatatgatctagccaatcaattgccatagatttgagcataggtgaaacacgatcatttttattaaagataatcattggagttctattgtaaggtagattctttaatttatatgcattttctaatgtctctaatttcttgacataattcttgattcttgataaacaatagtctacgatagcagacacttttctttctcccataaaattatcaaatatatgttttttcaatcttggtttttgctttttagttttatcgtctttcgtgttccaaaaattaaccttttgtggtttaaacacttttaaagttgggaatccttcgattcgatattctgcacagagtggtttatttgattccaaatcacaattcactgtcactacttgtactaacccacttaattttttcgccacttttttcattgtgggcatcaaattacgacaatgtccacaccatggggcataaaattctacaagagttgtgtaatttgatctataaataattttatcaaatgatttagttgttgcttcaattatatttatatcgtcattataaaaattacttggtgaggaattgatcgaaaaaacactgttaagaattgtgagccaacaaaaaaatgttaaaaaaattggtctcatcttatcacaataatgtacatgtaaatcgagatagacagatagatagatagataaggggacagttctagaaaaaattctactactagtattcgcaatataaattggtgcgacttggatgtaccactcaaacatgaagtcttctcctcgatatttctttctccttttcttcttctttagttttatcaattttctttctttttcttttttttcctgtttgaatggatgaatcttttcatcattaagaaattcgaaaccagttgaggtgaaagaaacaaagggagaacggagaaaggggagagggaaggaatcttattacgaaaagaagtaaaagatctccttatgaacttttggacagagcttaccgacatgatactcctcatatatatatatatatataagtaaagctttagtgtatgagagttcaatgtaatcaagagaacaaagggttttttgggatatatttaccaatagtctcaaaaataaaacaaaaaaaaaaagagtataagggtaagcccctgctacaagtgtgttttgaacaagagaggataaaatacatctattcttattgatagctattctacataattaatttattctttcaccatatttacgccaaaaaacatatcttttgaggttggtttattagtttattatggatttaatagaagaagataaaatctccccatatgccttttgggccttttattctttatacaatcatttaaataaaggcagtaaattcgaaggaaatcataagtcaagtgatcatataaagttcgatccttcgttaaatataataaatcagaaattgttccccgaatttgatccaactgattttaatgaaaagaaatctttatttatcacttggaagaaaaaagctaaacatggtaatgaataccatttgagaggttgtattggtacgttctctaaattaccctgttattatggtattgaaagatattccttgttagcatctttagaggaccctcgatttccaccaataacaaagaacgaattaccgctacttaagtgtggttgtaatatactgagtaatttcactacaatctatttaaataataaccagactattactggtgatatattagattgggaaattggtaaacatggaatagaattaaaatttcgttatccttttaaacacggtaaattgttgagcgccacattcttacctgatgttatggtagagcaaagatgggataaaagagatacattcattaatttgatcgagaaggccgatgtgttagcttctccagccgagatattcgaaaattatgataaatattttgttcaggtaataagatacgagggacataaaagtatgattgcctatgatcaatttgaatccaaattaaaagaattaaaaaatgtatctgagtctttgtaaatgaacaggaatacatatatacttatcataacctatatgttcctatttataaataaacgcaattagtcagtctgtttcttgaattcaaatatgtttttttgatcattttagtattcattcattcgtgatggttatcaattttatctctttatttatgcattttaaataaatatataacacactgcatttaaatggaattatctattcccttgctagacagacatgtagtacaccacaaaatagctataatcttctctgtatttttttttttcatttcactcatttaataactgttttgaaacacattagacataatggtgaataatttagtttaaaggaacggggggagggaagaaaaatagtgcggagaataattaagcggtaagtattaattattccgaatggataaatgtagagattacatgaattcattagctgaatgtttatacacttaaaaacacacagacatacatacttatacggacacgtatacacacacacacacacgtatatatatatttgctggttacatttatacggacaggtcacattaatatatttcattagggtgaaatgacatcatctgaacatgatccatctttatattcttcggctaggtatgatggaagacaaaggtctagacggcagtcattttcatcgaattggacagactcaactgctgctactttgacttcgggattaaccttggatcaagatacaggtgagccattttctgggacggggcctgaagcagttccaagttctcttgtatcctttcatcatcctcattctattcagtcaagtgggtttctttcatcgtctttgaattctcggtttacgcctcaacaacaaagaagacgatcatcagtagcagatactcaaccgttgatggagcgttctcctagtgtacaacgttcttcatcttcctctaatttatcatcaaggagacaaagttttagattctttactaatgaagaaattcatgatgctgaagggacggcaactttagaaaacacagattatgacatccagtgggatttaaaaccatcatatgaacaacaaaggatctacgggtctgatattccatctaaaagatcatctatacacagcttttccagaagatcatctatatctaggagtggcagtagttcttacggaactacgggcagttatatagggcatcctctgtcaagagcagagtctttagctagacaaaaccaactccaacaacatttacatgacctatctcaagtgtatagtgccaattctattgattcctccaccagtttatctcgatatagtgttactgaaagaattcctattgaattggaggaagatgaagatgaaatattggataatacttcgtcaatggactctacatctatatcaacatcgagtttaaatgctcaagagaatgaagaaggtaacaacaatgttaacgatgatattcatagtcattataaaaagggaacgtatcagaacgaacttttaaagcctatctatcatgaaaaattttatccaaattcttctccagaacagattattcaaaggttttatattactgaagaagatattgtgattggtataggtggatatcgaacttccgcaaaaaaagtgtttttatacaacatattttgtattttaactatagggcttttttctttattaatgagatggttacctgcaaaaaaggttaaatgtattggtgtaaaatgtccattagggaaagctgaatgggttgttattgaaaatgaatttggtgaattttcaatagaatatgttaagagagaatggtacaatagacctttaagtacacttttgcatattacaaaagaaacttttttagatacttcaaaccactcaactattggaacacgtcatcatcatacaacagatcccaatccgaatattccaattttaatatctttccaatatagatatattaaatttatttattctccagtagaagatattttcaaaactaacactaattgggttgatcctgattggctacatctaccttcagttgttaaaggcctaccaagtctagttcaagaagatagaatacttgcttttgataaaaatcaaattaacttgaaggtaaaaacaacatcggagattctatttaacgaagtactacatccattttacgtatttcaaatcttttcaattatattgtggagtttagacgaatattattattatgcttcatgcattttcctgatatctataatgtcaattatggagactttggttgaaaccaaaaaaacatccaagaatctcgcagatatgtcacaattttcatgtgatgttcgtgtattaagggatgagttttggacaaatgtgaattctagtgaattagttcctggtgatatttatgaaatctcagatccaaatttaaatattcttccatgtgattctatattaattactggtgattgtattgttaatgagtctatgttgactggtgaatctgttcctatctctaaaatacctgctacagaggatactatgtaccaattaatggaagattttgaaaatactcagatttctagttttgtctctaagtcatttctttttaatggtactacgatcattagagttaaagttccaccagatcagtctgcagcattagcaatggtcatcagaacagggttttcaactacaaagggttctctaattcgttccatggttttcccaaaaccaaccgggtttaaattttataaagattcgtttaaatatattggtgttatgacaataattgcgttgcttgggtttttagtaagttgtattcaattcattgaattaggattagataaaagagttatgattttgagagcactcgatatcattactattgtggttccaccagctttacctgcaactttgactattggtactagtttttctctaaacagacttaaaaagaaaggtatattctgtattgccccaacaagagttaatgtcggtgggaaagttgatttaatgtgttttgataaaacaggcactctgaccgaagatggcttagatgttttgggagtacaaatatcggagcctgctgaacataatttatttagatttggcgaattgaaacagaatgtaaatgatgtctttagtaaggattccttagatgactgcacctctccattagatgttaaaaacaaaaactttttaatggcattgttgacttgtcattcactaaacttagttgataatgaattgattggtgaccccttggatcacaagatgtttcagtttaccggttgggattatagtgaagaatttgagtatcaaacgcatgatgatttgagtaaaaatgatccaaataaatctatatttcctgataacgtcgatataatacctgcagtagtccatccgtcagatacaaatataaagtcaaataaattttcgaaggctaatgcccataattatttagggatagtaaggagttttgaatttgtatctgaattgagaagaatgagtgttattgtgaaaccaaatggtgatgagttgtactgggcttttaccaaaggtgctcctgaggtcattgctcaaatctgtaacaaggcaaccttaccttctaacttcgatgaaattttacattattatacacattctgggcatagagttattgcgtgtgcaggtaagattttaccaaaacatacatggttgtactctcagaaggttgctagagaagatattgaaaacaatatggaatttttgggctttattatatttgaaaatagattgaaagctacaacagctcctacattaaaagttttacaagatgcctctattaaaactgtaatgtgtaccggtgataatgttttaacagcaatatcggttggtagagaatctggcttagtaacttcaagtaatgtctatgtcccctatttaaatgatcctaatgatgaatttttagtttggcgtaatgttgacgattttgaaaagacactagacaccataacattacagcctattgattatgatcaagattatactattgcagtaactggtgaagtatttcgaatattattttcaaatgagaataatatacctgaggaatatattaatgagatattattgaaaacatctatttatgcaagaatgtccccagatgaaaaacatgaattaatggaacgtttgcaaggtttagattatacagtagggttttgtggggatggtgcaaacgattgtggtgcgctaaaagctgcagatattggtatctctttgtctgaagcagaagcctcagtagctgctccttttacttcaaaaatatttgatattagttgcgttcttgatgtgattaaagaaggtaggtcatcactggtcacctcatttgcatgtttccaatatatgagtttatattccgccattcaatttataacagtttccattttgtacagtagagggtctaacttgggtgatttccaatttctgtacattgatttatgtcttattgtcccaattgcaattttcatgtcatggtctaaaccatatgacaaattgagctcaaaaagaccctctgctaatctagtgtcacaaaagattttgattccattatttttaagttttgccattattttcttattccaactaattccatggttatacgttcaaacaagagattggtatattaagccaactgttggtggtgatgatgtagtgcaatctactgacaacactatattattttttatagcgaattttcaatatattttgacagctgttattctgtcagttgggccaccatatagggagccaatgagtcataattttggttttatctttgatattatactttctattctggtaagtgtgatattaatgtttgttaatgtaaattctttaataggcaagttattccaactgacagaaattacttttggttttaaaatgttcatttgtttttggataatattaaattatttggttcaattgtatttccctaatgcgatcaaaccttatttcaagaaaaaacagagtagcaaaaaatataagaatatattaaaaaattattgtgatatgtatactgtataattaactattaggtaacagatatatatgtaaaaggttgttgttatttttgagatgttatagcccgttaatttgtttcgtcctttggatactggttcatatggaatttgatgaatttctcattgacaagaaacaattccataagactccgacagatgaactgaaaggaacttgaaggtgttttggtacaatggaaaaattgatgatctgtgcaattggccacactataagattacaacccaaagtagaaaaatatattctttgaattttgattcttaaagtgctatcatttccaccttctatcacataattagaataagtaaagaacaggaaaagaaaaataggtgagtataccagctggtcacaaagaactctttcaaaagtttggattaatgttggatcagtagtgaaaaaaaaattaagaagcctgtaccaaggcacttggaagtttgaaataaatgcgccccatcccataaagcatatccatctccatatattaaatatagtgtaactttcctcatttctaagtgtattttctaaattaaatatattattgatatcagtggaaacatttgtgtcataagatgtgacaggtgtaaggccataatcattaaagacagaataatcgtcactttcaatatcattttctatattctcactagtatttcggtatagtacactatgaataatatgtgagtttgcgttatcaatcaactgaggaattgggtcaatggaactcataaaaaagcatgaaatacattgcgctaaaatatcagacaacccaaataatagaatgtttgtacacatggttgcaaataatttatttttgttataaaatgtcctataaattgttgtaaaatatattagaattgaaacccaaaggagtaatagaatccaatgtaagagggttatattcaatattttatagttacatatatttttttgtagatttattagtgtatatctaacggcagtgagtttttcaataaatgaatcatgatatgatctatttatttcattaaaatgtatcctgttattaatatttatatcttcattattttcttccatactaacatcatttattgaaaaaaaagaaacgaccaatagcaataacagaataaaccagttattctttattgatatgcctctaaaaggggggtcttaaacaaatctttaagctttaatgtatgttttgtgagaccgaatgaaatggcacatggtgaatcatttatttactttattttaatataattaatcggttcaagatttaactttattcctgcttttcctaaaacaactataaggcaaaatcttgacacctttattttcgacgtttttgaattgataacatcaggacacccaaaatataattttttaatggaaataatttaaaaataattattcccttttaggaaatagcaaaatgttattttcgattagtttcatttttttccgtatcacgcagaaaagaaatttcctgtttgtttttttcgaaccagaaggaaaggtttctgtctccgtagtggctattccaagtgttcagccgttaagattgtctagtagtagtagagttaaccaatctaccatgaagtcacttctgcaggaagggggtaggacaatctacggatcagttcctatgcgaattccgtaaagcaaattctgagcccagtgctggagagtaaactcgattggcaggagagacctgttcatattgttcatttcaccattggaagaggaaaggggaccaaaggagtatcagtaaactctcaataacttggtgaaacgtacgggcagagtagtttacagctattgttactagcaaatagtgattaatcactgtgtagggtggtatttcatatacataaaattggtatatagcaattcagtgtggtagtgtatggttgtggtagatctcaagctaaaagaaagccaagtacagtaaatacaacgagttcaagatgttgatgccaaaggaagaaagaactaagatccacagatacttattccaaggtatgtaagagcattgatactttgatggagaagtagtgaaaagtatatggttctgttgaaataatcagagaaaaaataaatatatttagcataatctagaaaaatgattacatcgccatcagttgatccatatattgataaaactggaaccgctaggtagatgacttaatacaaattcgttgaatgattattatattgaaatattgttgactgtttagatattatttcaggaaaaatattttgtcaaaaatagtagaaagataaatttgagcattttcaacgatcgcctatttcattgattagggaatagacattagtaacctgaccttttcctgaccataatatagattgtactatctattataagtgagtacgaatatttttactaacagaggactgatatctgtgtgcacgtttgctatgtgtttttccatgctttcgttatgccttataaatttttctcatgtcttttttaatatttaaatagaaggtgttgttgtcgctaagaaggatttcaaccaagccaaacacgaagaaattgacaccaaaaacttatatgttatcaaggctttgcaatctttgacttccaagggttacgtcaagactcaattctcatggcaatattattactacaccttaactgaagaaggtgttgaatacctaagagattacttgcatttaccagaacacattgttccaggtacttacatccaagacagatctcaaaaccaaagaccacaaagaagatactaaattgtttaagttaataaatagttaagagtatttcttttttaataatattaattaactgatcatatactactcaattttttttttgtttttcatatcaactatgttgacatcttcgtgcaaataataatagtagaaaataatattaaattcattgttaggggtatttttgcattagtcatactagtagtttcattctgtcttcattcatattaagtagttgaaattattttttaagcattttcccctattatgaagtgtatttttttttgatcttgttatgttttttacttgtctattggttcatgttctagtagcattttccaaactgtgtatgtatattgtaataattatacatctaaaggtgatggtacgcacttgtgtaaagagttgcaaaagtatttattcgatgttgttcttataataataaccttagatgtgaaatatcgagggggagagtgtctctaatttattcttaaaaataggaactgtagaacttatagtatatgcaaaagataaagtttgaaaagcattaaatacttactttccttttttttttttgaattggcaaaaagcatagctcttaagcatacatagaggaatagagagatttgtatgccattggttgttgctacatctccgagagtatagtgtacacgaaaagagacgagaagtatgaaaaagttattctaatggcaggccttggtgatgataattttgaggaacttgtacctatgatagattctatctttcaagggatgaaatcggatttggataaaccaataaatacaagaaaagttctttatttgttaagagaaatttttgggattgatttgtatagttataaacaagtaatatataaatttataaaatttcgatgggagcaattcaaacaactatggattgttaaaattaaaagagaacatatgcaaataagagaggtaaattttttaagaaatttgaaaggaaactatattgaagcaaaatatcatgttgataaaaatacacaggtagatccggatgtcgatggtgataataaggacaaaaaggttagtagtgatgaacaattactctcagaaataatagttcctactgatttaactagtattaaaattaaaaaaatggataaggctgaggtagattctcttcaacaagttgctattaaggagacgaaacgtgccagaaattatgtttataaggggttaattaagaaaagtagtaacaatattcgttttaataaaacagtttatgagacaaatgatttaatatttgccataacagggttaaaacaaggcacaagatttgaaattattaaaaaaattagagaatatatagaacaacatcaattaaaatcaaaggatccaaattattcagatgtgatagaatgcgatgaaaagttagtaccaatatttggaaatcattttaccttttctaggttaaggaaaataccaattgaaagattacttaaataccgttatggtgttgtacaaaaagatgttcaagtggtaataattaatggtagtgatgaacaacaaggtgctacaaaggttgaagaggattctgtggagaaataagaatctaaaaaaattaggttgtatggggacaatgaatgaatattagttactagtgatattggaaggtatggcagttatcagtgtattacatactttccgatatatggcttcttggaaggacgagtagaatgaaaaaaaaagaaaataaatagcaaaaacaagtattcaagaagttttctgttgaactgctgcgtctatgaggctaattcaattcttgtatttataccaaaacagcatgcattgttcttatgttgttacgttacggatgagtctaataagatgacaaaagttattgattttgccggttagtttacttaacgtccaagtattttttaaactaactcaacatggttttggctctttctcttacatttaaaaatagaagagggtttggtttcatacagaggtattgaaaagaatgtgtgtcacggaaatacaaaaaattgaaaaattcaagatctttaatgtaaatcaaaaatgtgcgaaaagtgaaaaattaatgtgataaattaaaatgtttaaaaatggttgcatcatataagtaaagactcaatgtggacatgtatgtatatactgacagaaaagatcaattgctgtatatatacattgtatctttgtatatctaaccaattaatattttgattatgcccgctcatctaaaattttaggaaaaatctaataatggaatatggtcaaaataatgtatatataaactcaaattcatcatcaaaatttatcaataacttatatcagtatgtgctaaaaatattgattttagaatatattaatcagccaaaatttaaacaaatagcgacactttcctccacatatgaaagtgatacctcacaaaatagtaattctgttatagccttaatgtcagtccaacaaaatactttaattgatgacgatgaatcaaggctgacagaaatattgaagcaatcattgaagaattatttatatgatgttactattaaccggaaaaaggtagataattcaatctttagaagatgtcttttgaaattaaataatgatttatttatggacagtttaatggagtcgactttaactcatatgagcaatgttgaagatttaatagtatatttcactaaagcagctaataatgaattaaaaaagttaccaattgaaaatactcgcgaagaattgtacaaacaaatatctagctttgttgatctcataattaaattattaccccaaagtagttcaacagagtatatcaaaaaattagaagagtataaaaatacaatgaaactatccaaaatgcagatgaagagacatagtgtagtatttggtcaaagtagagtgagttcattaccagtggattctcaatcaaaaattctgaatcaagaagttaaatacagtcaaagaaaaccaacttttgtaattgatgagataccatattcagattatttttgtaaactttttgctatggataaactagtggttcaacaggatatcatcaaattaattccagaagcttcaaattttaatatctataaagattatacaactatacaacgtaatttaaaaaatggtacaggatttttctctgagaatgattttttgcagaaacaaagttatgaaagatggcaatcacaacaactgcattctattgatgaacttttattaaaatttggaactatcagaagggcttccgattcttctaagagggaaaatgtaatagtaccaccgaatccgagggtgttacttcaggctttatttagcttggttttgagattggaatcaactagtggaataaactgtttgagtttttcccaatctgcatctttttttattttcaaaattgctaaatattggttacaaaattatccatcaactttatctgcattattgtttgctgcaattaaccagaataatcttaaatatgaagaaattaatattcctttaatggaaagcatgtttagtataattgaaaataagattttaaaggtgcaagaaagggatatagattttaatgattggaatgcatcagatattaagctatgggaaaacaatattaagataactgctaataaatgttttaaaacaatcgataatttattatctggattatatgcaaaaactaaaccaaaattttcgtctgtattagtattttattatagatatatttatgacagttcaagatcttctcttgacgctggatatctcaagatatttaagaatacaatttttaaaaccagtgaagaatattactatggtcttttaaagactttgccaaaagatggtacttttactactaaagacttccaaaatatttgtgagttaataattaaagaaatttcgttaattcagaaaaagtatacaaaacccctattggataagattaacattgccactgaatgtgcaaaaatgttaacgtctgcagtatctatagatacacctttaatgattgaacaaattcaaaagtcatcaaaatcgaaaaatactgttatttcaccggttgatgcactagagttatattcagttttaaaggaaataagaaatatctctcaacaagtaaataccatggaaaataatttgtccaatttagaatctacatttagtaaatatttaattaaattttcaaagaatatttctaaagaaataagtaaaacgtgtatcaatgcactaaaggtagaaaaatgggaacctttaaatggtgatattttttacagttcttcagttcttgatattttcaaaatggtaaatgaatcgttaaatttgttgcagaattttgattggaactatgattatacatatgcaattagtattgcattattgttgcaagcattttccaatggtatttatcaatactgcataaccgttgttgatataatacgaaaaagtttgaaagaaagttcggtggattctgaccagtcttttcaaaatcaagaagaggaagtattagctactcaccaatcaaataaatggaatcttcatacaataaggaatgcccttcttgcgtcagctgaagattcagttcccaaagcatacaaatttaagagaatagtttgtactatacttaacaatattgacatgatgattactctgctagaaaaattagaaacaaaaattgatgctagtaaactgtctgaagttataaacaaggattcaatagaaaagaaaagctcagtgtcgacacaaacatcagtaaatatttatacaatcagagtaaaaagcgcaaataatataagaggttatagtagtaatggtttatcaaacagctcagtatcaataattcatagtgaaaagcacaaaacaataggggaaactattatttatcctaattcaaataatccaatttgggatcaagaatttgatctacgtgcaaggacagatagtgcagtgactttagtatttaatgtatttcactttcctgggaggttcaaattggtaagaaaaaatgagctttgtggaaaagtaactttatcactaaactctaaagagtttgtagacgatggtctgccaactgctaaaaccctttgtttagatacacaaggtgagttaaatgttgagataactctagaaaatgaaaagttagatccattatttggtataggtaaagcttacagaatattatcgagaacgagagatgaaatacttgaacaaatagtaaataaatttacaccttttgttgattatacattctctaaagaaggtttaaagcaagtttgtggttctaatggaattttaaaaagtacagaaaacgatgtatattctgctgttattccattgtttaattatttaaatgaaaatttgaatattcttgcacagtctttgacacaagagttactttatatggttatgttaaaagtttggaatagattactaagaacagctgatattttattattgccccaactgggtattgcgaaacacaaattagcgcaggctaagaaagctttatggaatattgggaatacttcaaatattatgggttatggaaggccgctgactaatattgaaatggaaattgtgtttacatggttagatgctttatgtgttgattttttttataatgatggggaagggcctccattagagagcttgaagaatacgcaatatcaaaatttactgttaattcctatttactatgataaacctgtgacagaactgaaaaaggagatttctcagttaacgccactttattttaaatatatcgataagttaactgagtcatcacaaattgaagtcagtcggcatttaacaacagtccaacggagaaagactataatggccaattcctcgaaggctaaacgatcacaatatgagaaagagtttaatttaatagaaaaaagtagccaagagagggcatatacaacgttaaatattcttttaagaatacttatttcaaaaggtgaattagaatatgtttataaacaacttcatgaaaggaagttaaaaataaaacaaataaatattgatgctttggttaatcaggtatctcaaggtaagaagattcggtataaagagagtgtggatgtatagtagacaatattggaatgtagttttacttttactaagggctgtggatgtaatgtaactgttgtacagttaagaagaggcattatggattgcatatttttgtaaatgtaaggatattgatcctagtatattcagtattatgaatgaaacgcttattaatgttatatatatactctaatttgtattagtgatggagactttatatattaaaatatacatattatatcagcttaaatattcttgggggatttttgaataaattccaaaggtgttcatattacaccttaggtaaggtgctatgttttaatgaaaattgattgttatttacctatacaaacttatatctacatatgcaaaaatacattcgatatttcatagaatacttgatctatgtatattaaaatattagtgatattgtaaggttgctataaattgtttgttcagtgtgttgtttgggcttttatgtaaaataagttcactgtaatattttaattttgaatatttggtacgcaaacccttcttcctagaaaatttcccgaatattgtttcttaaaaaaaaaaacatatattttaatagttttctaaaatagcgttagtaggaaaggatcatgacatgagcaaacaaataaatataaggtatttagtgtaattaaccagacttgttcgtttagattagactaaattaatttagcttgtcatactttgttgaaataaaatgttctataatgaaatagatagaacaataagattttagcagacactaaacgataaattgtcgagtaataattattgagaggtcaccaaaggttgttgagtttgtttattaaatatcttactgttcgtagaggaaaatggctgaatgttaacacatataaagccaaggatttcatcatacattatttttatcttatttacaatctttgtatattattatttctatgttttatatagagaaaaagagcgaagaactttattataattttgtatactaaatctgtttaatataatattgagaatgtttactatatatctaatgaataagagcgctcattctcaacacactcagtattaattttgagtatatggagcacgtacatattatcatcttaacataaggtaatggttatcaacacttccttttaaatgatattttttagaatgtagtaactacggcacatgctaaccatatatatatatatttacaatgtagtattatccaagaagagcttcattataccatatatcctagggcagtatagcatcatcttgaaaaattactgtcataaggactaaataatcttagagacagagaagctaagaataatatacatatttttatatgcagactatttattttagccagtattgtctgcattctttaaattttataactatatcaaattattttgttgtaaaatgtatatattcacatctgtaatagaaaattaagttattatatgagggttctgtacacgataactctattgctacgagctcctgatggtagtgaatttaaaaaaatattaacaataataactaaaataaataaacataaaatatctaccttctctatattttcaaatgtaattttaaaatataaccaaactattataattactactgactaatcagtatataatttacacttacctgtcttttttgttcttctcatcggttatgatccttcttcttttctgttatttttactcctacgtttgtatctaaacttttcaaaaaagaagactcaaggataatatcaataactcgcatttccataaagcactagtcagaagtataatcacgacaaatgttgtcttggtgtcatcataaataatcttgtaaaccctctaattgacgatagtgctcttgtttttcatcaataaatgttgtacatacctgtatatacatatatctagattactccatatataaaaagtacaataatgtatcatatctagaggacaacaaccaaaaatgatttaccgtatttcatactctatatatgacatatgaaatcccaatatcactataaacaatcttgtgaactctttagtcgatgacgacgttcctgtttttcttgtttttcatgtttatataactatgtttatctgtatatctgtatatattagtttactctttatgtagagtatagtttatatgtcatatatagacattcaatcaagctatatctatctattttagtgtctagaagagtatatccctcgcaatcgggttttcatctatgacaattttcatctgtcacattctcattagaaaatcttatactacaaaggtaaaaaaacatggttcctagcgggatcgaaccgctgatccccgcgttattagcacggtgccttaaccaactgggccaaggaaccaactacctattgaccctgttgtagtatggtatggtgaagttctttgtgtattccagggaagcgcaaataatattaatagtaattcaaataatcgagacagtaatcaactatagtcgatagtataattactaaaacggtcttatatattaagcggcttatatcgagctaatgtacttattcgaagttacttaacttgttacttgcttgttctattttgtttatacataatatataaattatttacaagaaacgattatggaagatgatcttttatctcctgaaaacgttgtccttttatatgttttctggagctcgatcgattattcagattactacattaatgacttgactgattcaaaccctaaaatttattatattaatttaggtgcactactggattagaactgcatcccaattctctaatcatggtgattagtaatacacgtgggacttaataaaacaataggtaaattctagatttgccaagatcttatgtaatccaatctttttattatgcagcatctaatgttgtagcacatgtatggcttattaatacactaattggttctagattcattcaggatcttatgtaatcttgatggttataactattctattccacaacagacccgtattgtggaatagaattagatggcagagttgataaaattttagaaacataaaaaaaataatatttttcacaattaagcttatatttatactagaccgtgagtgagataattgaaaaatattcaaaatcctctcaaggctaaatatgcaataggtttttgaaatacttgaacttttaaatacaagaaataaaacatataaaaaaattcaatgatatgagcttaacaaaatatcttatgagtagtattaggattaaattttcataattgatatattaaaatatggatattaattatatatatgaatacttacaaattatataattggttgattccaaccaataaatagattagttctaattatttttggtaatctagttcgtcttcctctggacaaaatctattaaatagaatatgaatgccaatgctggtaattatctctggttccatctttcaatgctcaaatgtctcttaaataaacttttcaataatgtgtcaccaatattaatccggtgatcgtttgtttattcaaattgctggaatgatatattaactgtttaggaaacaagtaaatatatcaaaggaggaaaatgtttgtcatgcccattcaatattacagagataagatcaaatagaactaaaatggatcaatatattatgacatattgtcgaaaggtaaagatatataagtagacaagtttacttattaattttctaatctggatgaatagtatatatacattatattgtattttctattatatttatataattgttaattcccgaataagaaatggagggaaaattactctacatattaacataattaataacagaaaataataacatataatatgattgcggacgctaaaaacacgtatactactattatttatccagaggacgagcacagttactataaacatatatactatgttgtttataatttccaatcagaacttcttgtaaaatttttcctatccaaaatttattacttttattatatatattgttaaggtaatcatagacatatgtagatgtgcgattggttttccataataagtcatttaacagaaaaatagcataattagtcctgttgccttttttaataaggtctttaaaatcgatagttaaattagcctattaggaaaaacgtattgttttaataacttatgctcccaagcattaggaaaaaatttaagtcatatataccttcaattacaagttataaaagttctctgtgaagaattatgggtaaaatgatatacataaaaatagattaccatttttatttcaatcgactcttacttacaaaaatactaggggaaacaagcattattaactgtttgttcagaataaaaaaaaattcaaatccagagcttattttaaaacttcttttgtatttagtcttaaaaatagttaagataagttgctaataagtatgtaattttttttgtttcatttagttgtcaataatgaagcataacattttgtggattatcaaaataatttattctattttagattgaagaggtactgtttttttcgtggtaattttctatctttaatgcttggtacaatagcgacggttgtaagtaattgtttatccaaaaaaaaagagtatatatacttatatagatatatatatatatatgacaattgaaaatgtctaattcatatttttctaataaataacgtttttgtgtttcttttgcaattaacagtatctatatatatatagttgaaagaaggcacagcaattattatcaaaaatcaaccgataataaaacaaaaagttcaaaaagaacgagtatttatcatgtagttttctataatctattaactcgagaaattttatataacatttgactttttactgtaaatgatatgaataataatgcctgtacaatcactgcatatataaatcaagtatttattattaatatttttctccaatcattatccaaatgactaaattcattattttcactgatacataccaatcattattatttacaacaatatattgcataatatgggaataactttatgactatattgtccgtattgaatcgcatgcgtttgtaatatttttttgtcatggcaaatacaaatcagcaatttttcaatgatctttataggaacacattaggaactaaagaaaataagatataggaaaaaaaaatagtaaaacgccccctttgtgaataaaaagacaaaagagggtatattgaaactaaagctatgtccttgtgttttgtattattgactaattaaattaccagagaagccttagactacatactttataattttttcatatatatataacatttttattaagaattctaataagggtagaaagaaaaaaaaagtgtcaaatgtgttgcgttatctgttccatgtcagactgtattctatatattgttgcagtaatttttcctcctattgcagtcctattaagatcaggattctgctcctcagatttattattgaatattttattaactatgttaggattttttcctggattagtgcatgctttttattatataacaattacaagtcccttacgaagacagactgaatatgtgtatgttattcaacaaggcatagctgatattgaaagaaatgataggaataattcaagaggatatggttcatatgaaactatgcaagcacctttaattagttctaacaaaagttcaaataacgtatccatgattagtgaaataccaccaaaccaagagtctcaaaatggggatgcttgttcaaataaacagattgcaccacccccatatagtgaaatatcttgatttagacataacagatgattaatgagagatatatttgaagaaataatagtatattgtattattttcttttttgtttgtttttacatttcttctaccattaattatcagtattgtatgtgtatatgactatgtatgtatatttgtgaaagcaattaaatctattaaatgtttgcaagtgatgttaattttattcttactacgataatatttttcatttcatagtttcacatgagactcctcattaaacttataatattatctatttaaatacaatccttgttgtttattttgcaagcctaactctgtaatttcatcaatttcatttttatttaaatcaaaagaaaattaatattgagtatctagaattcattccttttttgaaaagttgataacctgtaatattgtattcttagtaactcaacagaactgattgattaggggtgtaaaaccttcgtttactaattggtactaagtctttgctgatgtgtttgatccttttttgcacaactattgagcaatgaaaggaagtacaatggtactgcaacgcattgatcaaccaaccgtttaaacagaaagttgtatttacccaatttgtatcaatccccccctcctgtttaacatttgtgtttgaacacttttggacaattattaatgaaatttccacttccccttttccctgatttagagatggagcatggtcacatgtattggtaactttaagacaatttaacaaaataactagcaacattccaatctggaattatccaggaatacagtataaggtatacagtcatatatttactttctatcagagacgttgtttcagaaataacaattttttttatcgttacaataactgctgttatttatacatttattttattggcattttgatggtaaaaaaatatatcaaacacatttaatttattaactaagccctaatatacatttttttactagttaaaacaggtcagaagcatggcgaaactcttaattatatgcatgactttttaagaagcgtacatagattagcatcatatgtaagactcttggtccatgcaaattaaataacaacagctatcctaacatatacattcttcaacatctaattatatctcttgttatttactttttcttggagatatctttttaatcattccgtctcttaatttctgtttattatatccatgaaatatctcggttcatctataacaatcatcccattaattcattcacctttaataagttcataatgttcgttttgaatgataacataagttgctcggaacatacacttttattgcagattgtgcaatgcaaacagaactagattttaaaaaagctctgttttttttattttccttaaatatatatggtgtaactactagacttacacttacacataatagattgatattaaatcttctcaacttttgctatctttccagataataagtgacaaaataacatatacgagaagaatataatactaatgtctattcctactgctgctgtccatgatgctgcatgcatcttttgcaagattcttaaaagtatgcttttatgtcaacaattctagaattgctttttttttttactttcactttgacgttttgtattgaatactaacagtcaattctttaacttttttttatatatctaatttttatttctatctttctttaaaatatagaggaaatcccatcatttaaattgattgaaactgctcactcttactctttcttggacattcaaccaactgcagaaggacatattttagttattccaaagtatcatggtgccaaattacataacattccagatgaatatcttgctgatattttacctgttaccaagaggttagtaaaattgcttgatttagatattgacggtgatgtaccaggttacaatgttctacaaaacaatggtaagattgctcatcaagaagttaatcatgttcattttcatttgattccaaagagagataaagaaaccggcctaattgttggttggcctgcgcaagagacagattttgaaaagacaggtaagttacatgctaagttgttagaaaaattgaatcaatgaattgatactgttttatatatatatgagtatgtattatacggaatggtttttttataatttttttattagaatattattaatgctaatgtattaatgaagagttacatatttttataatgacgtttttgttatgcttgttagaattcatttatgtcttcttcagtagactgtttttgaattttacaaatttatcagttttcaaataatttgattttctaaatcttatgggccaattaggttgtcctttattcgatattgttattgaatcattatttctggatgattctattgtaaaggattctgttagtggtatagtataagggtttgatagctcctctctctcaaatattagatccgcgttaccaaaactgctctttatactattcgatgatatagatggtattgatacttgagaggtagatctccttttatgttttatctcttcagacaaattgttgttcacataaaatggttttttacgaggactaacagctaaaggtgcgttaaaatacaatagattggtcttttccttctctttcatcatttcaattttatgtttatcgagtaatggtttcaaagattttaacaaatcattggtctcgatcctaatatcccatttgaaatatttcaataattctctttcgatagtattaacctcttgtatatttaagagacctccggtatattctgcccaatatttattctttggtgaggtatcattcaaagttttagatactaagattagacaaccaagaaatattctatgtctcgtagtttccattccataaacatctttagcaatgatattctttaatctagctaaataaacagcagtagccattaatgttgaggtgtgaacattggattgcacgatcaatcttttgataaaagtagataaattgggtgttgatgtattacatgctttattggttggtatttttatcagctttgatgttaaattcactagatatcggaccatatcatcactcactggttttttattaaactctatcagtgtgctataatcactaagcatggcatgtggtgtacaatcctatttgtgtctgctatgtttattgataaaagaaaaaaaactacgagttagattgatatgaaatgacttttctaatatggtatataattgagaagattctctctaatattatcttgggggggaagggggcaaaaaagagaaaaactgatgggttgttttttcgattacgttgacattcaataggagattaacaattgtggtctttatgtataatccctccagacagtattcgattttcatgatttcaaagtaaaagaaacaaagacaaaaagaataatataaaagaaatgctggtttaatggactacgtgaaaaatccgatatcaaagaataataaataacatattttatctcatctatttcctgccattacgaaaaagtttcccatacgaagctcagatctcatttattttcctcttttggaaataagtgcagcttactggttttacctatttaggtgaaaattgaaaaagagtaatctgttattttgcttccttgttttagtttgatcggcaagatcacaaaagaaagagaaaaaggaaaagaaataaatgtgggatatctaaatccttgcaaatatgtaaataatgatgtggaaactccagtttattttactctccaaactcaaaacagtcattgttgttttaacgaaattatattttgttccttatttttacctgtttaatgactgggatgtaatattgacggattatataagtctgatgggggtcagtgataggcacttgaacttatcgcaaagtaaacactatcttcttgatgtgtcttttcattatgtcttttcaaattgaaaacatctgttgatacagttttcttagtgtcaaaatacttatattttgctttttttttttcttttttatttgataattcaagttagatacagtagaagatactactttctttaacaatagtttatacattagaaagtaataataatatcagatattctttatttctttttcatacatagccatgttgttattgttagacaaaaacatttcaagcttgaagcttttgtagatgttcggtttaatttggttttcaaaatatctttaagaattatataatatataacaacacatatagtttagttaaaaatattgatttaaactaaaagataatcattttcttattttattttaagggataaaaaattaaaaaactatacatttaatcaaaaaaaaaaaggaaagaaagaaatgaacttcttataactatttcacaagtcattactccagactttaatataaccgtaattatctttgtaaataaagaatatatatacttgttactttttttgttctacatcttattataatatagttaaaattaaaagataaaaatattgaatggtgtgtttgttatgtaaagaataatttatagagatcatgtttgtaatgaatagaagcaaacttgataattatataataaggatttagcattttggaatatgtggaaaagcataaacgaattaatatagctcaaaataatagaaggatatatatgtatacttatttattggagaaaaaggaagaagggaaaaaaaagaaaacataaaagaaaatagagttgtaacttagcatgaacaaaaaaaattattttttttttgcttcatcgccctctttattgtgtctttttgatatttcattaatcttattttctaaagaagccaattcttccttgtgtcttttaatttcttcccttatatgtgccagttgttctttctctaaattacgaataaactggttttcctgagcttgttctcttttcgtaaatgaatttaaaccacctgaagatgtatctaataaatatgttcttgaagaattgatgagtactcttttgttaaataacagggatttattaaaaagtacaatacgtggagttaccagcatttttgaatgtatgtgttatattaatgttgtaaagttgattagaaggaataagctagtcaataaaattgtttcggtgagaaaaaaatgtatgtatatgtatatatatatacaatgaaattaatttgatatttgctttcgattatgaatcagttgcagtaatatgttatattaagtcaagttttgtcagatatttagaataattttataattgttataacaccaaacattaacaatattgggataaccaagataaaaggataatggagaaggaaaatgtacaccagttgggataatcaagtaagaattcaaaatgataaatgtatatgatttatcaaaacccctactacttttcctataaactttcagcttatgtttttttttcctatctgtcaaaagaaaaatgaaaaaaaagaaggaggcggaaattttagtgaaaatcaaaaaaaaaaaggacgtcttctgccgtgcaattagaagaaccactcctctctcctgtctttatttgcgcttctcctttctgttattggttcaataaaacaaaataaaataaaaacacaattgtcaaccttcagttttcatataatgcactatttgcctatctttaatatatctattgattttttcttatctaaatattagttattcattacataaaagtaaaagacgtatatatatgtatgtattttataatacttctttaaaagtgggaccaatgtacaaaatgatagtaacataaaaaataaaaaaatcaggaatcaaaaagggaccgtgaatttttgaatatattgtaaaacttgcgagatttcttgtcacttctatccagaatatttgaaatatgctaaaaaaagaaagaaagaaaattagataaacaggaaaaaagttacagtttttgtaaggtagtttattccttcttagcttttttagtggctggttcagcagtaatatctaatggctcttcatcggccttagtctttttaggtactaaggcaggggtatttatttcagcatggaattccttaattatagaatcaacatcatcaatattcaatggtctaatgtcacccatcttcttaatcttactagtaacttctttaatctgcggatctgttaaattcaaattcaattgatcaactcttgatttaatagcattccaaccggttaatctattggcaaagtggatatatctctttagaccaaaatcatgtggatttaagatttcatatgtggatggattagctaaaatggccttagcatgaataccagctttatgtgtgaaggcacagaacccagtgattggattattgaatggaatattgacttgaacagcgtcggcaactaataattccaggtctctgattttatgtaacttatattttgatttaacataatcaggagctgccacgatcattctagccattagcccaccaatggggacaataccgtttctttcaccaatacccaagacacaggtgtcaattaaacgggcaccggcttccaaagctgtgtaagcgttggcaatagcacaaccagtgtcgttatggaaatgacactcaatatcacaattaacaacagacttcaaggttctaactagttcatagacttgtcttgggttagcacaaccaacggtatcggcaataccaactctattcacaccgatcttactaacagtcttgtagatatttaataaatcgacaagatcacttctgaaggaatcttcagaagagaatctaatttcaatacctttggacttgacaaattcgatgacttcaatagcactcttggcaatgtagttcatatctttaccatgagaatattgtcttaaaaatttagaagtaccgataacaacatcgacaccatcgacacctgtctcaacagcaactcttgcatcgtccatgtgacaacgaatgtgagttaaaattttggcctttaaacctaatttacagatagcttcacaatcctttctagattgttcagatgccacaggcgaggttaattcgatatagtcgaccccaaaatcatctaaagccttggcaatttcaatctttttttcggtagtgaagaaagcattagcaaattgttcaccttctcttaaggtagaatcaatcaattggaaattatcgacattggataaatagtcagctgggttaggaccatatggattaacttgatgcctagctaaggcatcactttcatggattttcttaaattcagtatcactcatttttgtacaggtcggctcaatgtttgatgtatagatatgggtatatatatacgtatatgtacgtgtttgtgtatgttaatatgtgtttatggtatacgttagacgtaaaaaaatggattggacgattttctgagattgagagtagacagtaattaaataaatgtgtacaagtcttagaggaagatgccaaagaagtaatttgaaaaattcttagatcctatacaattatacaaaaaaacacctgcaatacatgtgcgtcttaccatcggtatatatatatatatatatatatttacattatttatataccgttgactagctataaaaagctcaacaatataaggaaaggagacgtgtaagaatagaaaaataattccatacaatatttgtccctttgaattagtcagagagtccaggggaaatagagcagagccatacaaaataaaatagattgagtcaccacagtttcttgctctctccttcctccctcgagattgcaaataattaaattatccgtacgatattttttttcctttattgctcatttcacacatagagaagaatgacaggaggagtcgaaaatattttggagtcataaaaaacgaaactcgagagaaaaaatacacaggaaaaaaaaacattgagggaaaaaagctacggaaaaatagagaaaataaaaaaaaatgaggactaaccctaaaaatgctctggaacttttctgaaatttcatgcaagttgagcaaaagaagaatgtctactcatttaatgttttgagagggattgtttatacgaacttgaagttttacaaaggaattagagtaggaaataattcttttagtatatatatatatatagatatatcgcattttttgtatttaaaagttggatttttcgagaagaagtttctaatgtttgcacatatttcatttactagaaataaattagacgaatgttgtttcgcaatttaaggttctgaaaattgaaggtgaaaaacaaaaataggaaagagtattgtttttttcttgatcccattttgtctgtgtttgattttcagtttgttctacgtcagttttatttttctttttttttcccagtgggatttctatcctgagttaaaaaaaacaaaaaagacctaagcatggagaagtttcttaaagaaagagagttaatgtgaactttcactggctgactaacctttataagttagatatctttgtcgtatatttcttgagtaaaagatatattttaagaaaagatgaaggtgagtaaggctacttattacataattatatcactagtatcttttaaaaggacaaaaaaaaattttgtataaaatagtctacaatcctacatgaaccaaatgaataatttatacttttttttctttttacgcagttgatggataaaacatacaactatatttcttaattttttttttatttcttattgtctttctttttttattttaacttatgaatttatatgtatatatcactattcttaatataactgactagaactttatatgaacttacattgtagataggctaaaaattcacttgttttcctcttaaaaccctttttttatgctagatatgaatatgattcaccatcatcagatctttgtaagtatcccttttgaattaagttatcaatggctcttttaatcatggacactttagcattaaacctttggtgagattgggcaatacattcgttaactaacatagaatgcggtaattttctcttagctttcatgattctaactatgcatgcttctaaaaatatctgtctttccgtgcttaattctttttcaatacgttcggattcagttaattcttcatcactatttgtgcctgtggcgttatttccatttcctgtaggattcttacctagccttctggcatttacatcagacgaatgtgcaaggacatttaatatatcattcttaacaccgcctgcaaaattaatattcgtttttaatgctttatatggagtagataatttaaattgtgtttcaggctttattaaagcttccaagccaggaggtatttgttgaagtaatttaaatttaatgaatggaaccatggatgcagcaatattttgaatcgacaagttggttttatcctgaatctcttctaaggttaatatattagactcattgaataataataaaatcgataattgaaataatgttactgtaaagataaatggttctctaccaggtttaccaattgatgcaattaattctgcacggcataatggccataaccatttgagaacacgtccattatgctttgatgtatacaagttctgcagttgttcatgtgagggttttaattcttctggcaaattgaattcaacctcttgatatgtgaatggccacatactctctgcaagtatgaatggttctacttctggatatttggcactagtataatccggtgatctcttaatcataacatcaaattcattctccaataatttagataatctgacatcttggaacatcttggtaatctttcctgtatactccatactgttttcactttgtaatctttgaataatagattcttcatcctcatcacttgtagatgtaccatgaattaatcttttggcaaataatctacgataatgtgactcaaacgcatctttatctgtcaaaaatttgaaaattgtcatgatatcatcaatggacatgtctttagaaatttcagacttggtagatctttttaacaattgatcactgtatttagccaacatctctgatgttcttgaggttgcagatctaagagatcccggtggtaatgcaaattcattgttgtttatatattctctacaggcattgtctagcgcctttgcaaataatgtgtcattgtcaaaacaatccattgtgattccacggaaaaggttgtaaacctctagtaattttttaatgtattcctttggtggtaatgaattggttgcagcaagcattatttttttattgatagaacgttggttgggattcttatcattcatttggttttgatcattaacaatggctgctctgtgttgtgctaatagttgtttaactgcattttcaccagaattcttgatatattcctcatatacagcggccaatttaggtagtaaagtaaaatctctgttcattaaattatatatcccagatagttgtgcttcatctctcgaatctaaaagcgtgatgaaatcagattccaatttgtcaacgtgctctataatcaaaaccttgtttagagtctctgataacggtttcttggtatgttcgtcccagtacatacttaatgttttctcttcatgatataatatgtgatgtgcttcaaagatatattcactcacagagtgagtagctaaataatttctggaatattctctataatactcttcagttttagctaaaaatggtttttcaaatacttggatatagacatttaagttcaatttttttaaatcttgtgggtctattcctagagctacaaaggacttgattgcagtagttaaggttcctctattgatactcttgccatctctttcatcggttatttgttgcaaaatctcactaaccaaaacttcactattaggatcaaacattgtttctttccatgtcattaagcataacgtattgacgtcaaaaatgtgtcttttcccgtcacttctctccttttggacccagtaccggttcatataatcaaaagtgtgattaagaaaaatcgcaccaattgtgtatcttttccaatgtctaacataaaactttaaaaatgattcgtttggttgtttctgaaaattattaatataatgttttaaatatttctgtaacctttcataaatctcactaccaactaaaattgagctctgatttggaatgtcagtagatctatcagcattaaaatggcctgaagaacgagatttgttcacacaataattataaatagcagtgtaaatttccatatacatcgttggtgataagaccttattaactctcttggttgattggctatcttcacttcctagaattttgttaataccaggttgaataaaattccaagtggcgtttaaatcatcggatctaggtagcatttcagtcatattcttggagggggtaaaattactgtgaataaaagactaaaacagatcaggtaagcactaaaagttgttctttgtattaacttaattattaaggatcctccagtgggaattaagacaaaaggttgttaatcagtaataaggtattaaaattataagttataaaaaaaatgagatctctatgaaattactctttatatatcaattgtaaaatgttgctccttctgttcagtgaaaaatgaaaatattgatttacttggaggaaaagaaatcaatattgaatatgttaacagattaaacaaaagataaactcaattatttgaacgtatatttcttgatggtatttttttttccggaaagtgaagggatattttgcaattttatgacacgtataatatttcttttaaaacttccacatctgctctagcatcaatgaccaagtttccagcaccaccttttttttattattaaaaaattattttttctttaaaaaaaaaaaatgaaataggaaagaaggacttttaacagcaccttgcgggtaattttcaccataaaaagaaaaaagattcaaactaattcatataggtagcttgaattgaacaaaatccggtaatatttcataatcaaagaaagttcttaaatgctaaatgaatatatacgtctatctatatgaataatatttataaaattgatatgattctatatgctttctgttttgttcgattgttctatattatattgtgcttttcatttggggactgtgcgtctaatgattcttatcatgctgaatatgacacaaagtatccaagtgaatagtaggatgaataaaaatgcagataatgctttttgttttctgcaaatatatgggaccaaagggtatacttttgtaatttggccattcacatttaaaggataagtatcactacaaacccatctagtatcgtatcttgtattgaaggctaatgctagattagcacttgaaaaaatgacaaaaattaggtcaagacaaatcagcttcatcttgtcagatatatttcttaggccaatgggggcacttttaaattcatcatgtgctatatacgccgtgtatattgatgcaattgcgttaacacatatagccattatggtactcggttgttgtggaattgagtctagtgtttcattagcatagtctctagaattttgaaatattcttacagagagtcctagagatattagggataatatgagaataataattctaaatgctaatggaagaattctgctattatcaataaaattactgatatgtggtttccatttaaccactttttgatcaaaatattttctccatttttccgtttcatattctaactgtgatctcatcccatcctgatttttcaagtgagtggtatctccttcagttccttgttcttgttgatcatcggatttatatacttgttcaaataatcttggtaaatattccttccattttttttcctcgtctttattgttaaaattataatttgaattcttaaatcttaatattttttctaacctttgatcacccttccaatcagaatccaaatcacataatatttcatttcgtattttttccttttctgcggcatcaaatatatcatctattgaaaatttggaggaattaacagtttttctgctattattactgattatagaataattatctttgataccaacctgtttcttgtcaaaaataggaaccaatttactcggaaaataattagtatttgttcccacattatgcgctaattttgaccatttcaagtcactttctgatatattttcagtatgtagatcggtttggcatgagaagttactagactgtttctctaaatctgtgtagatttcatcaagaacaaatggtggaactgttacaggatatactggatgtgttaataactgttttctgtaagtgggtaatattttatcctttttttttcaatgtaatgttatttttaacgctttgtggatgcttttcagcgctagtgataagtacagtgtttgttatatctgtttgaatggcagttattggagcatcattatttttgtatgtttcaaaagagcttgtaggagaaagtggagatattgatctactgtctttatcaatgtctaaatcagaagggtcacttccttgaacggaatgtttatcatccatttcaattttacccttctatgtactgtaactatatagcaaaattaggataataatactaataataataataatataacaaataatgcaataggtttttttagcaaaaattaaaaaagatgttatttaagtttttgttgttgtagttttttttttttttcaagctaattggtatatattggttagactaagttagatggattgtcaagactgcaaagtagaagatttcgttaccatctcggtttaatttcgtttatcttattacttatttgttttgtgtatataaatatgtggagatgtacatataaatgaaattatcaaaccctaaagaatattctttagggtttgataggtgacgtacttgttaagattcttcagaaggatagtaataaacaagaaaggtttattctatatacaaactctccattgtatttttagactcacaggaaattacatacataacagagagaatcacacttaaataaaatagattgaagttagaaggtgatttgcttgctttctgttctttatttaatcaatttgaaatcaaataaatgttatcacgtaaataagggaatatgcctgttgatatatatatatatatatatttatgtatattgtttgttcgtttatttgtttgtttgttttttggggtgggcaacaaatagaattattaagtatcccttagtttcattttgaattaatttgcttttgttttttggatcaccgtgccaaccctttatcttataggttgagaaaaataaatgtggatatatatgtatatatataaggaagcagtgtaaatgataattcgattattttttttactttggacttggaatacatatcttagttaatttcagttttttgtctttattctctggcacaagactttatttcatcaacaccaaaaacaacgcatattattttatgattgtttttaataatgagagctaaatggaaaaagaagagagttagaagacttaagagaaagagacggaaggttagagctagatctaagtaaatgtctttttttacaattgatatataccgttaatatcatttatataacgacacataaaaatttaaataatattattaaataaataactgttgtttgattaagtatctttttttttgcttgttttatcttatttgtctatatagatcaactcttttgataaatagtcttattctacagttcttatctcaaatattaacaaacatgtgtcttcacttctgtaatacacttatagagcatttaaatattgttttattaatatttgtaaagtacatagaaaatatttagagatgatataaatagagtaaaaaaataaaaaaataaaaagataatatggaaatttttatattataatagagtatatcatacagtctcattactgttatatttataatcttttattaaattatatttatttcgttacttttgcttcttttctttattattattaggttcacaagtaaattaatcagtagactcagcaaatctttcttgtatcgtgcttaataacttttcaaattcaccatggacttcgttttgacccctgcttggttcaaaaaatttggatgatgaaactgcatgcttaacatcactcgtggcttcagacaatttagaccaattggcaccatttgagactgccttttgagcctcgtcatgatatgatataaatgccttcatcatgtcaaaagtcttccatattggacagaatgcatcatatgtagaataaccattttgctgtaagaaatcttctttgattaatgtagctacatctaatgtgatcttgtcactatcagatagagcagatttaccgactaattgaaccacttgttctaattcttctgcattagataaaatttctttcattctatctcttaaagttgggaattctggataattgttgtcgtaatatttgttcaacacatttgtgtatttggaatatgaaatagatgtgttgatagatggaaaatgctttctttgtgctaatttcttatctaaaccccagaaaacttgcgtaatacctaaagtagaagtcgtaactggatctgaaaagtcaccacctgctggggaaacagcggcaacaatagacacggaacctgtacgatctggtgaacctagagcaacggctttgccagctctttcatagaaggaagctaatttagcacctaaataagctgggaaaccttgatcagctggcatttcacctaaacgaccagaaatttctcttagagcttcagcccatcttgaagatgaatctgcaatcatggaaacattcttaccttggtctctaaagtactctgccaatgtaataccagtgtaaatagaagcttctctagcagccacaggcatattggaagtgtttgctactaatgttgtacgtttcataattggttcttttctaccggaaatttcagtatataattcagggaattccatcaaaacttcagccatttcgttacctctttcaccacagttatgcactagagctaaagaagataataaatattgtttgtcagtggagtcaggtagagtgataccatagtactcatcttcttccttagcttgaagagtgaaatagaagggaacggcttttcttttgaatggaagtgaactaacactgtttcttgtggaagcacataatctcaaaacaccgttaagagcagggccacttaggtaaatgtgatgtactaattgatgaacgatgccgtttttgtcaacatgttgtacttctttattgactgacaccctgatacctaaggaacgagctaacttgactaaaccatcagaaacggtttcataaatggtgctgacacttgcactttcaatgtcaccgttttctcttttcttaacataaccagcagcatcgatcatacctgcaatgaattgttctctaacttcaatatcatcagaagataaatgggctggaatagctttgatagatttacccttgtcgttcttggttttaataccgagtgaggtaatagtgttccagaagcaattctttgtagttgcatcactgttatcaaccccattagcttttaaagttatggctatatcaccatactcattcaaagagaaagacccagatgcaccatctgtagtgccttcaatctcttcattatcaaagataattgagccatcttcttgaacttcaccattttcaatttgggaaagtatcttttcttcggtctttttgttaaacaaagatgaaggcttattttcagaagtagaaacagatagaccaaaaatgttactgtattcagtaatacgggttactaattcatcatttaattgatcagcagcaaacgcaggacgatctacaaaaccaacacttgcccatacacccattaaccaagcaatttgaggagcatataatggattggaattgatatccttcaaaagcttggccaatttgcccgactggtagaatactgggttaattaactgtgtggtaacttttttaacattgtgactgactttaatataattagatgcttccatctcccaatagattggattgcgatcaacactgacaaagaaatctttagccatttttttagccttttcttcaccgtatagatcatgtggataaactcttgtcttttctctgactatttgtccatttttgaagtcttcagacgccaaataagcgacactactgtacatcttaccgtttaacttatgatgactaattttaacactttgtggagtgcataatactaacatatggtttccagaacaaacaaagttgattaaaccagaaatgctttggttagatgagagttgttgagcagtttcacagacttcatacagggtttctttaccacgtggtaagcccacaacttctcttggtttaccgtctttacccatcacttgctcaccaacagtaatatcttcgataattttatctgagccatcggccattaaaacttttgtacctttttcaaaacaaccaacatagataatagtatcagaattggaatatttagatagggattgggagataactgttttaccacagccaaaggcaccagggatacaagtggtaccaccttgaacacaagggaataatgcatcaagaaccctttggccagtcaacagaggataatcagcagacagtttttcagcaacaggtcttgggacacgaacaggccaggtatggaacattgtgtatgtatatttaaccccatcgaattctacttcgatgatcttttcatctacagtgtaatcaccttctggtgccaaccaagtgattgtacctctagctcttggtggcaaaagaatcttatggtcatcaatcaaagaattttcaaagacagaaccgaagatatcaccaccagagatatggtcaccgacggaatatttgccaggtgtgaaatgccacttgatgtctctgtttaaagcaggggcgtcgatacctcttgggatatagatagattgagacatatctttgatagctttcaagggtctttgaataccatcatagatagtttccattaaacctggacctaattcgacagataatggttttcctgtcctgagaacgggatcacccacagtgacacctgcggtttcttcatagacttgaatagttgctttatcaccatctattctgatgacttcacctactaaattatcgtgaccaactttaactaattcatacatggcacaaccaatcatattttcagcgatgacaacaggaccagagacagagtaaatagaaccatattctgattctgcatggtcttctaaagagattcttttaatctctttacgagcattttcgatagtacctgccattatgaactattaatattattattaatattaattattactattattattattattaaggtataattattagttttgtattgtattgtattatattatatcgttttattttatttttatttttggaagtatattcgaatgtatttcaatagagaatattcaatccaaaactccgatatcagtttatctataatataaatatttgaacactagggaattatattaagtcgattgattgaaaataaaataaaagaaagaaaaccaaataaaaaaaaaaaataataaagaaagaattagaaatacaggtacacgcacgtacacacccaattatttaattgaataaagtaagtaattatttcaaaaaaagaaaaattaaataaaaaaaacaaagttttattattagtttgtttgtttattgatttgtttctctctgttttgttttgtaatagttatcttctatatgttttcttgatagagttagtgtattttaaattatacacatatacaccccaccctatagacacatattaattttttaattttttaatttttgatttttttttttttgattatcaataatcagtattataatttgagtgtttgttctatttttccttccactatttattccaggatgattagtgtttccctacatctatcagaatgagagaaaaagaaaagaaaagaaaaacagaatcctgaacagtttagaggattaaacacctggcggaatagttttccgaaatccttttttctaaaaaacctgctaggtgtgtccagctatgcggagatggtaaagagaagggggagatgaaatcgaggattgggtgtggaacgtatcgatttcgcaatgttcgagctccaaggaaagcgcggaaacaacttttttttcttgtttccttcccttttccccttcccctataccgtgaccttttgaaagaaatttggtggaggagaaaacaaaaaaaaaaaagagggaaaagccgactgcgttacgttaccctcctttttagctgggagttttccatcaagaaaggaggaagacgcaaaaaagaaaaaaggaaaaaaaaagaaaaaagaaaaaagaaaaaagaaaaattgaaggtgaagcgaagtgaagtgacaaaaaaaaataaggggaaggtgacaaaattcagaaagcagtagaaatcaaaaagaaaagaaaggaaaagaaaataaaggagactcaggattaacgctgtcgtgtgtgtaaaaacaggaactatgaaatatgttcgaacagtaactaacaactgctactactgtgactattgaccattaactacttacttataactgtattttatgtctcttgctatgttatacagtgtaatatataacaagaatttagtctaatatataagatagcattttctattcttttcttttcttttttttattgtttctttaatacgtttaataaatactacaatattcaataagaacttttgttgtaataagttcgttttattttggtgagatttaatttttgagttttgtatttgtatttttttttcgtcttttcttctattttgttagatcagtaaaacaaagacaagataaatacacaagcaagtaatcaattagtgatattcaatcactgttactgctattactatcactactaatacagttttacaaattctattctgccttagtttacttcccgttcttcatcattttttattattatcattctcccccttccaaattgttcttttttttttcttttacatatataattttttttttgtctaaatttttaaaggaaaataagaagaaacgtatatcacatacacattcacatacattcatccatacgtatagttatatatacacaatatttgtttatttatattcaaactaataagatcaaataataattacacataatggacatggatatggatatggatatggatgtacctatgcatgatgctatgtcagagcaattgattcctacaattaatgaagattcaaataattctgataatgaaaataatgacaacactaataatacgataaattctaacggaaataataatgataataataataataataataataataataataataataatattactaataatggtggcaatggcggtgacaatgagaatgattaccaagagatagattttaaacctggttcctctggtatagcagacaataaatcaaataaacctttagaactaaacccttcaaatataaaccaattagatgcctggattgaaaaattatccaaatgtgagatcttatctgaagatgacgtatcaagactttgtagaatggctgtagacgtgttacaatttgaggataatgtccaacccgttaatgtccctgttactatttgtggtgacatacatggtcaattccatgatttaatggagctatttaagattggtggtccttgtcctgacacaaattacttatttatgggtgactatgtcgatagaggttattactcggtggaaactgtctcctttttggtggctatgaaagttagatatcctcatagaatcactatactgaggggtaatcatgaatcaagacaaatcacacaggtttatgggttttatgatgaatgtttgagaaagtatgggagtgcaaatgtttggaaaatgtttacagatctgttcgattatttcccaatcactgcattggtagacaataagattttctgtctacatggtgggttatctccaatgatagaaacaattgatcaggttagagaattaaataggatacaagaagttcctcatgagggtcccatgtgcgatttattatggtccgatcccgatgatagaggtggatggggtatttctccaagaggtgcaggcttcacatttggtcaagatatcagtgaacaatttaaccatacaaatgatttgtccttggttgctagagcacatcaattagtcatggagggatatgcatggtcacatcagcaaaatgtcgtcactatttttagtgctcccaattattgttatagatgtgggaatcaagctgctataatggaagttgatgaaaataataatagacagttcttacaatacgatccatctgttagacctggtgaaccaaccgtaagtaggaaaacaccagactactttttatgatatcattcatttcttctcatcaagaacaacattaaaataagaaataaaaaaaaactaaaaataataataataataacaataaaaaataaaaataataaataaataactaatttttttaattagttgattaatcataacctattatttttttgtcttcccaaaaatataaatataaaatatataaatataaaaataatgatgtacgcctattaaattccttaacaattcatcatatcagtgagtactatatatttatgtcaattttttttgttttatgtatcattaaactccatgttcaatatatatatatagagatcaatcagctgtcgctatattctgaatcgtttgtttttataagattgcaaagtaattatgtgtattttgatatatatacatatacataaagttagaggataataataattctatctaccattattgttctggtaatggtcacaatgggttgatatttgttcaaatacaagagatagaacagtatttaaaaatgatacctccaggcaaatcattttgaatactttagatttatttcccatttaatctagatatatgatgttaagaattatttatcgcagttataagatctcatggatgtaatttttcttaagtacattatttttttgactatctgtggtttggaaagatagctctgattttttattctaaactgatgtattgtattctagtcaactgttattattgtaagatttgcttggtgagactaatgacttgagcaaaggaatataccgtacgtcctgctaatgtattcacacaatagagcatactatgtatatgtgtaaaatatcaacatataaggctaaatctattactcgttgtaatcatttggttgtgtttttgtattttttctctgcaagataagacatatgtcatttaataatttcatttgctgtctcgtaatacatttcttaatttgttccagcttactttttacttaaaaaaactgtactttagttactattccattctcatgtatgacgttttactctttgaaaacttagtgttgaaatcaactatatcatatttgtctatatactggattctattattaattactttagccccaaatagattggagatatcatttgggatttacttttatttaaatgtatagaatagacaggttaagattgatattcatctcagtgaattattttgttaaaaagaatatactagcagcaataatgtattttgtagaaggtaaatatggtaatttactagttcattatcagttacgtttggtatgtgatgatctaaataagtgcatgaatcattgaagaaaataatataacgattcgtagtctctattcaaaaaaagaacaaaagttaccaaaataacatttgagttggccttagttttacaaagttttatataggataaggtaatttcctaatttatcgttgatttgatttaattattgtggtgacatatatccgataaaaatttgagaaatcattgttcactttgggtttagaagaaattacgagtggttggttgataatgtacactattgaaatggctataaaaaaaattcaatctgttatttattttaaaaatgttgttattgtaagtttgtcctattacggtagtaactttttaaaagtgatgttccattgtagaacttagatggataaaatcttccaaaataataatgtgtatatatacgacgcacatatatgtatatatatcaatagtaacattttacgagtttcttatttttgtgcttgctcgactttacaatcttaaaattcaaattaatcttctcgaattttatgaacctttgcaagttagttgaatcttctaaatggttaattataatattggtaacataaaattaaataggatagtagcttaggtgactcaccacgcaaaacattctttctcaagtttttagccctctcttctcgaaagacttcattaattttctttttctttttttggttcggttatttttgtcttctcgaggctttaagaatgaaacacgccaaaaaatagtttttttcttcttttcttttccttttttcttttttggatattttttgtattttatgaggatcatttggaaatcgtagacgttatataattaatttttaaggaggttttgaagaaaggcatctaaacctttcaatcgtgttttacattggtcaaacaggtttatatactatggatcaaagtcgtttcgtcttggtttcatatactttcgactaattaattgatcagttatatattttagtaaggactaatcaatttagattgcaagcgatcttcttattttatttcgttacaggaagattggatcgaaacattaccatattattattactatcaactcaaatactgtatactatataaaaaaaataaaataaagtaagccaacatgtctactgaaaatgaattcaaggaatttgatgatgaacaaagtcaagatcattataaggtttctgctaagaagaccttagatgaatataaaacattagatgcagaagatgaatcattggcaaagtggaaggagtctcttggattatgtgctgatgtgttgcctttggaattccccggagataagagaagagttgttattaaaaagattcaattgatcatcgatactgagaaagaaccaattacgtttgatttgacaaatgaacagactattaaagaattggcaagcaagcgttataagattaaagagaattcgatttataaattgaagataatattcaaagttcaacatgagattatcactgggttaagatacgttcaatatattaagaaagcagggattgcagtagataagattgacgaccatttaggttcttatgcaccaaatacaaaaactaaacctgtatatgaggttgagttgcctgaaagtgaggcaccaagtggctttttagctagaggtaattatagtgcagtttcaaaatttattgatgatgataaggtcaatcatctaacattgaattggggtgttgagattgttaagaaataaaaaaatacattatcagatttcttattatgttcttgtctataaaaaattatagaaatatatataacttacgtatagttgttccccaatatatgaatcagaatttacatttttattaatattttgtctaaaataatactctctgtcataattagttttggttggttcattactagtgtatgatagtattaaaaatatgttttttaaatatacatggaatatattgatattaaaaaaaaaataatttacctgtctatatgatttactattttaatagttatatgtcttcttataaacacagttagcgttatttttgtatttttattttttgtattattagtatccttggagtaatatgcaatttgtttaaaatattttttaatattcaataatatacaatattcacgtcttccttttttagtttataagtatcgcaacagttctaaagtttaatctgaaaaaaaaaattctctaggatacttcaatccttataattgactaataactgaaataaagtaaagttgaaaataaaaataaatataaaacaatgtataaagaaagtagaaaagtttttgatctttatatttctatttaagtttatgttactgtaatttttggtttctttatatatttttatattttgtagtaaagatgccacaactcggaatttccatgaaaaatgatacattaaaattgaagttttttttctcgtcgtagaaatcatatcatgtgtataagagataaaaagaaacttcaatgtaaacatatacatcagaaaccattaaagttacctttgactttaacatattttcaatcattacaaacttaatatatagtatctttcattttagaatctgatatgtaactaagatttatattactttttctgttaaattataaaaatagtatataaagatggacaaattcaatcaaaaaagaaaagcatgtttaattatatatacaatatacagccgtctgcaatatatattgtaatactgacttttcaattatcagtataataggtatgattaatttggtcaaaatggagtgttcccattcattatatttatgattggttctttaagttgttacttaaccattctaaaccttcgtataaaccttcaccagaagtggcacaagtggattggataaaccatggacggtttctaattgaatgtaagcctaacttttcagtgatttcagcagcggacatggcttctggtaaatcttgcttattagcgaaaactaaccatacagcatttcttagttcatcttcatttaacattctttgcataacctctcttgcttcaccaatacgtgatctatcattggagtcaacgacgaagataacaccttcagtgtttctgtaataatgtctccataaggatctgattctgtcttgtccaccaacatcccagacagtgaaggaaatgttcttatattgaacagtttcgacattgaaaccaatggttgggattgtggtgataacttcacctaactttaatttatatagaacggtggtcttaccggcaccatcaagaccaaccataagaatacgcatttccctgttgccaaaaaggttgctgaacaattttgaagcaaataaacccattgctgcacgttatatcttatcctgttgtttcacttgtttatctgtcctggagaatttgtctcacaaagactcctgtaacaaccaagtatgaatataaatcaatacaataattgattatataaatacaattttgtttatttcttaagttattttttttcctttaataaaaaaaaaaaagagaaaaaaaaggaagaaaaaaaaggaaacattgcactcagatcatttcatacgttattataaggatatttttgatagttaatcctctaaatggatgaatacataatcatatgaagaaacatcagaactcttcgtataacgatgagaatctatatatgaaagaaagaaatatttggatatgtaagttaacaactagaaagaacatatcattaaataacggcaactataattatagcaacgaacatatacatgcatgaataggtaattgttttgttacatctttttttgacattttgtttctttcctttagatcaatgtttcgcattctactcttgctattcaatgccatcgtgttacttataatattacaactcttcttgatatgaacaccactacaactattattattggaatttcaaattgtatttatcaactatttgtgtccttcattatccgttctacctctttaattatgattatctgatgatttacttttttaaatggttagaatcacctcataatctacataattatttacataagatgcagtgtctgaaaatacaatattaatttcatttaacatattttttgtttgccatttaaaataggatatctgtctgaataataaatggtagcattgtcaagtttcattatatcaacaaatttaattcttgattcaaataaaataaacaaagatctcctattatataaattcaaacaaaaccattgcacatatgtataacattatttcttattttaccatattgcttatttgttaaatcattaatatcatcaatattatatggatgtcctttattaaatccctggcatgagagattactttttaagagacacttttctgtttttcctaggttattatcagcatacatttcattattattactatgatcattatcgaagtaacatatattattctaaaatgtatcttaaccctctctttcattgttagtaccccccccctcatcatttattacagtttctatttcaatttcttgttagttagatggactaccttcttaattccttcttcgtctatcattcagtaaatagaaagcaaaaaaaaaaagaaaaaacagattccaaggtaagtctttctcaaataatattattctattttatctgagatcaaagtactcattttataaagtgtaaaatacacaacaacaatagccaatgcaatggttgtatcccagatataaaaacatcgaaaatataacatgcttaggaagaaataacatataatattgtgaaagaaaaaaaaataaatacccaatagtttcaatataatttgtaatgcttttaaatcttgcatctaataaaaataattcaacaaaacaattatttactatacgtccccatgttgaaaaaaatgcaataataaacctgcaaacaaaaaactacagtaacagagattaagttgtatattttaattatagttttaatatcgattacaaaaaaaatagacaatgtcaaaaccattcccacctatatcaaaacatttctctcatctaaatattcatcgagaaacagcccaaatatactaaatactataataacaacatatatttccaatgaaatcacatatggctggcttaattctgtgatgtaaaaacaatcttagcctttgataaaaaataaaatgtatcccataaattgttgagagtcttcaattattatttctgtaaaaattctaaggccatgttcacgtctatctccacttgatttgacataatcttaaattaaagtttaactgaagaatgtcccataatcatacataactttaattccattaagtccttctagtaattttagatcaacttatagcacacttcttaagaaaaataatgacttaactgcattatcgattttattaataaaatatctaaaacccttccaataaaaacaaatcatacttatgaccgagaaaactaaccaaatggattataaccctaatgggattctatgtacatataaatcatttcctaactgtatactttgaactattccattaaacactaacagctcaatcataattaaatggtaaaatgaaaagattataccacctttcaaacgcctttttcctgtttctacttgatacaaaagaattattgtagatattagccatatactaacaactgagataacacatcccaacagtgataatagacactccatgtatggtagcagcataagccctactgtcccatagcatctctctagtaaaaacagtaaaactttcaaattttttgtgcagtaatttgtaatgatattcgaataataaacaataataaattggacacaataatggttaattttccactatatccataataaatgacaagtccatgaaagaatcataaaaaagtaactaaaaaaaagaatgacacaaagattaatatttacctattaaaaaccttgaatggatccccagttatctcttcggtaaatacaggtaattttattgcactattattcaacccagtatcatatccaaataaaagcccacttactgtaataggcaaacccatcaataaggtcatgactttggattttaagggtaataactatgacagtactctttgatattcaccagaaactacctttccatttttacctatagtgttccctacatgtgcaaatataaacaaaaaataaatgatccgccataagcactattgcgattgtaactattattaccgtcggtatagtttctattggaaactaaaatatatattattattttctttcatattctcatagtaattacctataataaaaatattgtttggcattgaaagagataaattccctttatattgtgtttctaagtttatttcatgttattgaccattcaatactattgattaagcatctttcttgttttgctttcatttaaacaaacatcggcagaaatgtagaaaaaattgcgataaacataagataatctatatatgttcgtatgtatgattctataacgcttgtctctcagttaatagatgctaataaactgaaataaactcaatctcatcacattcggttccattcttatcattattatttttattatttttattatctttatctttttttttttttcaaaagttttcaataaatgacaagaagggaaaaaagaagaaagaggtactacaataggacacatgctccaaaatctacaaaactgtaaaggataaaaactgtttaaattctcttttgatagcagatgacattttgtatatattaaagcatcaggatatctattaactacttaaaatggcaaaaaaaaagacggaagagaaattgaagaacaaaaatcaaaacaaaaaaaaagttcttcttaccaaaaaatctttacatggtgcaataaaagggttattaaatgacattaagagagataccactgttaggaaatcaacgagccatgatttattaaatccaacttcatttaaaaataagaagcgttctcatgtaacgagtaacaattccaccactactactagtactactattagtaacggcgataaaataataaaacggaaaaccaaaataaacgattcacagttagaatatttagaaaaaaatggtatcatatatattaaatcaaaggaaaacagattcatacctaagctaacggatgatgaactaatggtaaggcataaaaaggcagatgaaacaatgagagatgtatggaacaagattattgagaaatatgaaaatgttgtagatcagggtgatgttttaaatttacaaacaggtgaaataatagaagatcatggacatttaaaaggtgataataccagattacctttggttgatcgtataaccacttcttataaaactagcatcatggatatcttatataaagaagaagaagaaaaagaagaaaaagaaagaaaacaaatacggaaaaaagataaactcatacccaacaataaagaatcccttgttgcagggttatcggataagaaaactaaatgccaacaagcttcagctaaaagcctatgggacccatcagataatgataatgataactatgaagatgttgctaattctgatgacattgaaattaatataaaagaaaacagtgatgaagagaatgtgtggctttgatactggtattaatacatagcataattatagtaacaccaatttatagacctctatataacgttagtagcacgtattgataacatcattactatatagactattggaataatgacactaatgacaccgctggaattcgaacacctgcccacggtctttactaatgaaactgatagggttacccgacccatcactatctacgaaatgtgttggaactgataattaagtgaagaaaaaagaaaacaaaggagaagagaaaaaaaattgacgaaaatcgaccaaaattgaagtgaaatttttaaaaaaacattataaacaataatcaactattaacaatgtttgattggtaaaagatagagtaaaaatatatattagcacgcattaaccttaattttctttattgttcctttttagtttgtaattgagttaaaccagaactttctcagtgcactagaaaggtgagtgatattgctatttacatattataagcaatttctatactcggattatatcttattaaaaagaacgttttccgtggtgctacttcccttctagactaccctcatttatattacacctctttttcttaattatttaacatatttcattactctttttcattttaattattccatagaacaaaaatatagtaaaaaaagatctattactcctaaccccctctgtattataaacccattcgactcaagtgaaataaaaaaaaactttaataaaaccttcataatcatacaaatattagtatatcattattttatttccacttattgtcatacaaataactatatttccgaaaattattttgatccagtaatataaactcttatatatttatacagatatacaacataaactacaataaaatagaaaaaaaaacattgaaaatggttggtcaacaatattcaagtgctccattacgtactgttaaagaagttcaatttggtctgttttctcctgaagaaatccgtgccattagtgtggccaagattagatttcctgaaactatggatgaaacccaaacaagagcaaagattggtgggttaaacgatcccagactgggttctatagatagaaatttaagatgtcaaacctgtcaagaaagtatgaatgaatgtcctggtcattttggtcatattgatttagccaaacctgtgtttcatattgggtttattacaagaatcaaaaaggtttgtgagtctgtttgcatgcattgtggtaaattattattagatgaacataacgaacaaatgcgccaagccatacgcataaaagatccaaagaaaaggtttaatgctgtttggactctttgtaaaactaaaatgatttgtgaaaccgacgtaccttctgaaacggatccaacacaactagtatcaagaggtgggtgtggtaacgcacagccaacaattcgtaaagatggtttgaaactggttggtagttggaaaaaggataaaataaatgacggtgaagagcctgagcaaagagttttaagtacagaggaaatcttaaatatcttcaaacacatttctccggaagattcaacaagattagggtttaatgaagaattttctcgtcctgagtggatgatcctaaccgttttacctgttccaccaccaccagttcgtccatctatttcatttaatgaatctcaaagaggtgaggatgatttgactttcaaattggctgatatcctaaaagcaaacatcagtctggaaacattagaacataatggtgctccacatcatgccatcgaggaagcagaaagtttattgcaatttcatgttgcaacatatatggacaatgatattgcagggcagccacaggcacttcaaaaatcaggtcgtccagtcaaatctatccgtgctcgtttaaaaggtaaagaaggtcgtattagaggtaatctaatgggtaagcgtgtggatttctctgcaagaacagttatctcaggtgatcctaatctagatctagatcaagttggtgtccctaaatcgattgctagaactttgacatacccagaagttgttacaccatataatattgacagactaacgcaattagttcgtaatggaccaaatgaacacccaggtgctaaatatgttatccgtgataatggtgatcgtattgacttaagatatagtaaaagagcaggtgacattcaattacagtacggttggaaagtggagcgtcatattgtcgatgatgatcctgtcttattcaaccgtcaaccatctttacataaaatgtcaatgatggctcatagagttaaagtggttccatattctacatttagattgaatctttctgttacttctccatataatgcagatttcgatggtgatgaaatgaatctacatgtccctcaatctgaagaaactaaagcagaattatcccaattatgtgcagttccactacagattgtttccccacaaagtaataaaccatgtatgggtattgtgcaggatacattgtgtggtattcgtattttaacattgaaggacactttcttggaattagatcatgtactaaatatgctatattggattcctgattgggatggtgttattccaactccagcaattgtcaaacctaaaccattatggaccggtaaacaaatattatctgctgcaatccctaaaggtatccatttgcaacgttttgatgaaggtaccacactattatcaccaaaggataacggtatgcttattattgatggtcaaattatctttggtgttgtagataaaaagaccgttggatcttcaagtggtggtttgatacatgttgtaacaagagagaaaggtccgtatgtatgtgcaagattatttggtaatattcaaaaagttgttaatttctggttgctacacaatggtttctccacaggtattggtgataccatcgctgatggtgcaactattaaagaaattacagaaactattgctgaagctaaaagaaaggttgaagaagttacaaaggaagcacaagccaatttgttaacagctaaacacggtatgacacttcgtgaatcctttgaagataacgtgctacgttacttaaacgaggccagagataaagcaggtcgtttggcagaagttaatttaaatgataccaataatgtgaaacaaatggtaagtgctggttcaaagggttctttcattaatatcgcgcagatgtctgcttgtgttggccaacaatctgttgaaggtaagcgtattggttatggttttgttgatcgtactctacctcacttttccaaagatgattattctccagaatctaaaggttttgttgaaaactcatatttgagagggttgactccacaagaattttttttccatgctatgggtggtcgtgaaggtttaattgatactgccgtcaaaactgctgaaaccggttatattcaacgtcgtttagttaaggccctagaagatattatggttcattatgataatactattagaaattcattaggaaatgttattcaatttatctatggtgaagatggtatagatgcctcatatatagaaaaacaatctattgataccattggaggctcggatgttgcatttgaaaagaaatacagagttgatctattaaatgttgaacactccttagatccaaccctactagaatctggttttgaaatcatgggcaatctaaagcttcaatcgttattagatgaagaatacaaacaattggttgaagaccgtaaattcttgagagatgtctttattgatggtgaatctaactggccattacctgttaacattagacgtatcattcaaaattctcaacaaacctttagaattgactattctaagccatctgatttgacaattcgtgatatcattgatggggtaaaaggtttacaatcaagacttattgtacttcgtggtaaaagtgacataatacagcgcgcccaagaggatgcagtgacactattctgctgtttggtacgttcacgtttagctactagaagagttttacaagaatacagattaactaaagaagcctttgaatgggtactgaataatattgaggcacaattcttacgttcagttgttcacccaggtgaaatggttggtgttttggctgcacaatctattggtgaacccgctacgcaaatgactttaaatacattccattttgctggtgttgcctctaaaaaggttacttctggtgtcccacgtttgaaagaaattttgaatgtcgcaaagaatatgaaaacaccttctttaaccgtatatttagaagatggatactcatcagatcaagaaaaggctaaactaatcagatctgcaattgaacatactactttaaagagtgtcacggtggcatcagaaatttactatgaccctgatccacgttctacagttatcgaagaagatgaagaaattattcaattacacttttcattgctggatgatgaaatggaagcttctttggatcaacaatctccttggttactacgtttagaattagaccgtgctgcaatgaacgataaagatttgactatgggtcaagttggtgaaagaattaaagaaacttttaagaacgacttatttgtcatttggtctgaagataatgctgagaaattaatcatacgttgtcgtgttgttcgtccaaaatcattagatgcagaaactgaagcagaggaagatcatatgctaaagaaaatagaaaataccatgcttgaaaatatcactcttcgtggtgttgaaaatattgagcgtgtggttatgatgaaatatgatcgtaaagtacctagcgaaaccggtgaataccaaaaggttcctgaatgggtattagaatcagatggtgtaaatcttgctgaagtaatgcaagtccctggtgtcgatgccaccagaatatacacaaattccttcattgatattatggaagttctaggtattgaagcaggccgtgccgctttgtataaagaagtttacaatgtcattgcatccgatggttcttatgttaactaccgtcatatggctttattagttgacgtcatgaccacacaaggtggtttaacatctattactcgtcatggtttcaacagagcaaatactggtgctttgatgagatgttcttttgaagaaactgtagaaattcttttcgaagctggtgctgctgcggaattagatgattgtcgtggtgtttctgaaaatgttttattaggccaaatggctccagttggtactggtgcatttgatgtgatgatcgacgaagaatctctagtcaaatatatgcctgaacaaaagataacagagttggaagttggagaggaaggtggtgcaactccatatgctgatgatcatggtttgattaatgctgatattgatgtcaaagatgaattaatgttttcaccattagttgactcaggtgcatctgattcaatgtcaggtggatttactgcttatggtggtgcagactacggtagtgctacttccccatttacctcatacggtgatgctcctgcttctccaggatttgggggtgtatcatcaccagggttttctccaacttctccctcttacagtcctacgtcaccatcgtactccccaacatccccgtcatattcaccaacctctccatcctacagtcctacgtcaccttcttattccccaacatcaccttcatactcacctacttcaccatcatattctccaacatcaccttcatattccccaacatccccatcatattcaccaacctctccttcttatagtcctacatcaccctcgtattctccaacatctccatcatacagtccaacgtctccatcctactccccaacctccccatcttacagtccaacgtctccatcctactccccaacgtctccatcctacagtcctacgtcaccttcttattccccaacatcaccttcatactcacctacttcaccatcgtattctccaacatcaccttcatattccccaacatctccaacttactctcccacatcaccatcttattctccaacatcaccatcatatagtcctggatcgccaagacattctccaaattctaacagtacagataagaaagaaaatgaataattactgaaagacaaaatataattttatttataacctctgtttgatgataatatgcctcttatttctttaggatatgtttatatgtataatatagaaactagaaaatttaacgaaaatttacgtttattactaacataaacaatattttaatatttagatttaatagttgtacatccacctacgaatatatatttacaatgtctaaagcgttaactatatcaattgtatgtaattcttttctgtaagaagtcttaattggaaatcctggaatacgttgtctatgagtaacaccgaatatcgaggtaaaagacttagaatagtcaaaagtctgagtcccagattgtgagtatattcgaatgaacgaacgattgtttgatggatattggtgacaagtcactgagaagtttatttttgaaatctttgcttatttacaaatggtgctaagggtaatcatcaacattaacatttatattctatttaataggttccatctagaagaaaaataagacaataatatggataaccaaaattaatctatctattagttagaatcaaccaattatataatttgtaaatgtttatatgcataattaatatccatattttaatatgctacttgcgataactcttacgtttccccattcaagcacgtattcttagaaaagtagatcctctaagaataatcggtgctattgcagtaatcaactaaaaaataatgaacagcctattccatatattttttagcatacatacaatcagtgtataaactttcaaactactgaaatcacaaaacttttttagcgattagtcccctgaatatgtcaaaagtattcccgtcaggttgcaaatgataaattgcacctgtatagtcatttgtactattaaaatttagttccttcgctattaaaagaccataatcttcagtaataccgcatattttagttcttatattaccatgtgaggataaagtgacaatttgattagaatgtaaccaatatttataatattctggcaaaatagattttccaccataatccacaaatcttgataataattcttccaaattattcatataataagcttgtaaaatttctggctcaatatgagataatgcaggcaatccagcttccttacgttctacattcaaaatgtcaacccagctattcaatgatgtggttggaccatcactacttatatttaaaccacaccctaataaaagagtatatttattattaataaaatgagtgtttaccagtaaacctgaaatttttaaatacgcaggttcaatatcaactagaggtactaaggaatgatcgaatccagtattcaagattttcattttgtttttatagtaataatttgggtttaatgcgtataaatcatttggccatttgattctcaccggcaaatcactataaccttcaccatatgaggttattgccttacagtatgctaacattgaaatatattgaacaaatacaatagaaattttttgttgagatgttggagagactaggggcaaattgaccactgctgttgcagctgcgacacctttaggattaacccatatattaccccctcttcctctacctaacacttgaattgtaccaatatgaatggtagaattttcggggatcgaggataataatccattattattgtttagcaaagaacttgtggaagtgaccacttcaccatacattagcattgagcctagtgtatttcttggtttcaagtgttgaaagtatttgtgcatatcaaaatttggaatcagttcagatggtggtaaaatttcttccctagttggaaatatgattggtttagtcacatcttctggttcttgttcttgtaaaatcttactagctacatcatgcgacttactgaaaccttcataaaatctgaatttatctgtcccatcttggccttccacataattttcttgtgaatctaaatagttaaaatttttaagcagtaaatctttcatatggaggatattatcatagtttcttggtgaggcaacaaatattggtgtcaagtttggtgctctaacattaccaaactcattattacaatttaaaccagttttggttaatataaatctgacaaaagctttcctcttctcatctgtattcttcaaaagagctatagttggtttcaataactcataatccttagatctttctaatattttaggaataaattctggatgagtacctgttagcaatattttcccttcacctgccttacataacactacagcagcaggtttaatattaagttcattcacgtctgcatatagtacatctgtctgttgagcatagtgagccaatacttccacattagatttaatatcagcatcaacaaaaactgccccaccattgaaatagttgtacacttcctccccatagcaagtgattagtttagctgccttagcacctatctcactattatattgaaaacctttaaaagccggacctcttccaatccctggaaaaaatgctagatctcttctaccagttacttccatatttggatcaccttgtgcaaattccactttacttgtaccaaaatatccaccagcgcaaaatccgataaatatacccccaccatacacaaactgtttaatttttggtattatcggtttacattctttaacgtagggcaagtcagcacctccagggaacacaagagcagatgttttccccacccatggttccaattctaaaacctttgcagatacggtactaactgcataataaggttccaaaaaatcacgtagtgtttcgacagtatgtttcacagaacctggagtagtaccaggaccattatagactaacacattcattttatttatttttgatagaaacctttttaaagtaacagttataagaattttggggaaaatagctattttagatagtgtaaattaagactgaatggcgacgaaacaaacaaatacagaaagatcaactcatccaaagaaagagagagcgaaagagagataatagtgatgttacttctaatctgtggatgtcaaagtatgataattatgactataacggaaaccctgctttttatacttccaattttcacttgattagatcagtaccattatcatatatgtcttttataggatggttttttcactttctgacgtttgatgttatttttttcatattccattagtgtttaactacagaaaacagaaagtagctcaagaaataataacctttcaagatctgtgacaatgtctcttttcctaattgggtagttgcacaagcaaaaccatttatatttgctgcgaacaaaaaacatatatgcatgcaaacatatatacattatattataacgtttagtaaacatcatagaaaaaaaacttgtatttccaaattggttatgcttgatcaaatattctaggaaagagaaaagataaagcataattattgttcaaataattaacgatactactaataatggtaatataatctacaaactataaaatagaaaacgatcttttgttgtgcatttagtcatccctcaccctcattacttcaacttctttcttcgtaggtttttttttcctgttatttttagaccaaaagaaaatcccaaaaagtatttgataattatacttctttatatatttatattatacaaccggccaaattatattacctgtttgtttatatacttttatttattagatttacttatgtttcttgacttctaacgactaaaagtgatatcatcaatacgtaatatagatttaacacattctgcagcaagggagatagcgctagttgatacaagaacaggttgtaaaatatgctcttcatatgtattggtagtaccggatcttctcactgagataccatcatataattcgccattttcatgtttagaacgtaattcagtcacaactttaatactattcaaccctgcattttcagctaaagtggttggaataatttccaatgcctgtgcaaactcttgccagataaaagattctacaccttccatggctcttgcctctttggttaatcttctagatatttcaatttcaggagcaccaccacctgcaattaaacctctttcctttacaagacaacgtaacacacataatgcatcatgcaaagaacgttcagtttcatctaaaatcatgttattagcaccacgtataaccacagaaacggttggctttgcagtaggactcttaataccagtaattttaacgattttggacccatcgctttcaatttcctcaataagatctgctgaacccaatctatcttctgtaaacaagtcaatatcagatatcggtttacaaccaagactctttgaaagaaattcaatttcttctctttcaatatctttaaccaccataatacctagtttagacaaaaaatgtaacgccaaatcattgacagcatccctcaatatggatttttgaattaataaaacgttacatttagcctttttgatttttttacaaatatttaataaatacgctctttcttcctttaaaattttatccatttgtctataatcgtttattacaatattattttcggtatctggttttggtggagaaatttggaattgaattaaaccaatttttgctttttcttttcttgttgggccaccagcagatttaaccacagtttgtgtcaatataacaccatcaaccatttgagtgtcatcaatggtgccaccaacttttttaatcaaacgaatatcatttagatccaccgttgttgattcctcattcgcgatctttaatatacagtccacagtcaatggagccaaaaaggatgagtattgagatacaatctttgaacttaaggatgttgtggttgcacggattaggtcctctctatcagatagtttaatacggtggcacatttccaaaaggatctcaacagacctctttgaagctctttggaaagattctgcgataatagttggatgtatacctttatttaataatctttctgcggcacctaatagagcccctgttaagataacaacagaggtagtaccatcaccagcttctgcatcctgtgcagctgatacttccactaacattttagccactggatgaaggatggccatctgcttcaaaattgtatgaccatcatttgaaataataatctcaccacgagatgttttgatcattttatccatacccttgggccctaaagaagttctgatggcatctgcaacagctcttgcagcaataatatttgccttacgtacttcttgtggtttttctcttcctttaaaagtggcattggaaggaccaacagctgctctagaggacattgcacttgaaacgccagacattatattaataatttaaagttaaacaaatctcagggtattagtaagtatgtaatagcaatattcaaaaagggacaacgtaatatggagaaaaaagaaaaaaagaaaaaaaggaagaatgaaaattaaaccgattcctacagatatatctaaacttaattgcaaattgctacaattcaatagtttattctttcactctgtgctagaaatttaacaacaatcttggaaacatcccaatcaatctcaaaaatcaacactctctattttttgcctttttttccacttttcttttgcttcagagaaaaatgaaagaagaaaaaaaaaataaaatacaaaataaaatgaaaaaaaaaaagaaagagaaattccttcgagaagaaaaaaacaaaaccctaacgaaaagacttcgtagatgatgatcgcggcaaacagccttgaataccgtacaagaaccacaacagcatataaacacagcaccgaacaaacttcaccaccaattaccaatactaaataacaacaaacacatacatatatatgactgtacccttcctatataccctgatactcctccaataacatggttcatagtatcttcaaaagcaatgggtgattattttggcactcttaatttatctttcaaaacaaacaaagattagatacgaaggagatatagtataggcagtttatataacactttttctgccatctttttcttttttgaagagtaagaattgcaatcatatattgaggaagtttctatcgaatagacgtgcttaattctaaactttttactgtctttcaccacaacacaacacatcacattactactttcctccctgttcttctcctcttcatcccattttctcgtcaatcgcatcctatctctttcttctatctttagaattgctgtttattacattttgttccactttggtgtaaaaataataatgcaattactaggattactcatcatgcttattaagggatgcaacaatctttgtatagacccatacatctcattatccaatctcgagaacataatttttctttacggcttctcgagtgatagcgattttcccttttaattgtcttttgaatcaatagaggtaggggcacctgaaagatataaatttatatcctacataccagatttttatgtacatatttatgaggatagttatggggacaattacactttgatgaaaacatatagcaaaatataactcacctataaccattttttcttttcttttcttcctgtctttcttttcgccaatattatagcaatgaccatgtgctcgaatatttcaggtaacaaaccacacgttattgtcattggtgcaggcggcgttggtgtcattgcagctttatccttattccattgtaataaaacagaggtatccttggtggtaagatcggattatgatcatgtaaaggtccatggttacaagatatcttcctgtgattatggtgacttagaaggttggaaaccacaccatctatacaagaatgtagaacacgcaatcaaagatgatccaaaaagattttatcagtatgtcttagttaccactaaaaatattccagatggaccatttcagtctcgtgtaccagagatcatcagaccaattatggaaaataatttgacttatcatattgataagaagtgtaacattctactaattcaaaatgggatcgagatcgagtctgatatattgacaactttcaacaaaactacatataattataatatcttgtctgggattcaaatcattggatctaccaaaatagataaaggtgttattaatcagcaaggccatgaacatctaagcgttggttcctttgattcatccgaccaagactctattcttgctgccaaaaactttataagttattatttaaatgaaggtttcaattcgattgaatttgatgaaagggtgcgctattctagatggaaaaagctattatataatgctgccattaatacgaccacagccttggtaggtcttgacgttccaagagcattagaattcggcaaagacaaaaaatctactgaatttggtatatttagacctgcaatgaaagaaattgttagaattgcagaagcggaggggataatattggaagataaatttatcgatttttttgtcaactgcacaagagatctattattcaaaccttcaatgtgtgttgatgttcaaaaacatcaattaatggaaattgaagttatattaggtaacccaattaaattagccaagaaatacggagtcgagacacctgtattggaaatgttatacaatttattaatattagttcagtgtaaattaaaagaagaaaaaggattgattgtatttgatgaaaaaatctcaagattaatcgatcactgatcagcaactcttattcttttttccagctttattctgtcttattgtaagtttaatataatatcgattcatttatgtcattaatagttatatagtcatggaaataatagaagttagttgacaatataatgaaaaaaaaaagaaactggtttaatatctttttttaatatccatatacttatgccaattaatttacgtttctactataatctgtattattattattagtattactgttggtatttgcagttgacgtagttaaggtagattttcttaaacgtggaggtggaggtggaggtattggtttgttttttctttcccataaagattcagcagatatgtctgacagcatattataaaattggttattgttttctaactgagatgaagtgtttctatacgtatatcctttgttatcattactgttattattgttattatgaagactatcactgctgacactgttggaggatgaggtggaaaacatttctgaatcatcagtttgccttctattgattattgtaggagtgttcatagacatggaagacatactaaaggctctcttagatgatatattttgttcatcaatttccttattgatactgtcaatactattcaaccaagaaacctcttttaaacatttaaatgctaacctaactgtaagtttatgttcagatgtgatattaccattagaacaaatgttatcaaatacacagagatagtttagaagttgtattaaatcttgttttctgtagtgtgtcttattcaattctgtatttttcaatagaggaatcaatactcttaaaaatgtgtttctcagaaattcattctgatcagatatatcatgtagttcccttattaaaacatctaccaatacattcaaatcgtttagatagaaaaaatcctctgcaattttgtttgatttatttgagaaaattaaatatagtaatttacacatcataatttgtaatgatggatcttcacttctattaaacgttaataataataattctgaaaatgttttgtttgttgaataattgttattaatgacatacttcaatattttattttcgatattaaattctctgctatacatgatatattgttcattgatagccaacagcaatttgaattctgaattattgaaaaggtcatccaatgtatccgaccttatcgtgcttatcaaaaagtgaacaaaaaaatcatcaacaatttggacattcgatatagaacatttacagtatttgaatatctgatacattatatccatcaacactgtacaaatctgtttcatttcattaatgatacctgcatcgatttcagtaaactctactttcccttttgaatttgcacccgtattagctgtgatatcatacttacttaaataagcaaactgtgtgtatagagtattatagataacagtgaacccttgatatttcaatataagttcgactgaatttaaatttttcttaatttcaaatagcaaaatatagctaataataaatttcatatttaattctaaaaggtctatatttaataatgacaacaacttacttatacaaaaatccttgtactttgtgaagatttgagattcagttagaattaaggataacctgtagatatctttgtcactgttaataagatccttatatttatctgtagatattttcaaaaaattcaccaaacaagaattagctacactattgtctgctgtttctgatttagatatttgattgtaatccaaaagctcttccatggaattccaaaatctgataagttcatccttatcatattgaatttcattgggagatatatcgccatctattatcattatatttctttcatatataagtctgtattaatttacatatatatatacatacatatacatatatgtgtgagtgtggatgggtgtatacgtatacctattagaataagcacagattaatatgggaagccaaaaaaagccaacacgaataataacgagggaaaaaggaacagaataaaacgctaaaagaaattatattataatagtttatattatccgtgttgttgttaattgttaatacggtaatactaaggtggataatatcacagatagtctgtacacttttcagatgtatgtctgttgcacttgtttattaaggagtgaacctcaccttttttttattttacttcatcgtatttttttttttatgttttctaattctccgcatctgaaatttgcaaatgtttcgttttcttgtcttgacacaaaaaaaataagaaaacaagaaaggattgtctgcaaatttacatattgaataactgacacttgctacattccacaagaaatacagtcagtttgatactgaactgtagtaaatcactacaaattttgaggctatttataaaatgaataacaagactagaagatttaccttttcaaaaaaataaaaaaaagaagtaatatcataaatatacacatacacatacacatacacatacatatacatatatatatatctcaaataatatcaattcattctattatcttctcttctttcttttttgttatttatttacttcctacccactcccatctttcacaccttcaatccatgcataatttcttctttagtaattagatgaccaatagtttcaatttgctccaataactcatcaacattattcgaccattgatttaacagttcacttgaaacttttggtttttcaaaattgacgattcttgctggcctattaacttttgcgtatatgacaccttgattcactaaatcactaataaatgattcagtttcagcctctgataaatccagtaactcattcaatcttccaagtgtgattctagaataatattcagagataactctaagattatgctcgatgactctcttctgcaattgttcccaatgaattttattattttcaccaccgaatgcaaccggatccttttctaagacggttccataaatttgttttacgtttggccacctcatcaactcttttgtggtgaaaagtttaatcatagattcttgaatctctaattttttcaaattattatctaattttactttatggattaaatcgttttgtaaattcccatatggagaaagaattaagaaatatacaatatggaccaaggcatccttccatctttgttcatcgttttgcacacattctgtacggtaaatctcctgataatattgagcaatatctaaatattcatttttatgtaaaccgatcttaattaacaaattgtaataatctaatttcaatgattcatattttgaattctggaatgtctttttcagaatttttctagacaaaactgtggcttgctggaaatccccctttaatatacaaagttccatttgttcaagtatgaattcaatcttttcaaacatctccatcgaactgtaagtctccacttgcaattcacataaaaggttacatgcttcatctatcttacctcgagatcttttaatgttacaaagatctctagtgacacgagccctttcaacttcaacaaatattttattctctgtaacagttctaatagtctcaatgactttaatcttattttccaaatcaatcttgacattatattccgaatcatctctcaaatatttcatgatctcctgaatcatatactggatagacaactttaattgaccatgcttcttggataataagatcaactgttcattcaattcatcccattgtcccttattggccaacatatctacaatcttagccaagacctgtttggaagaagacaaatctgcggcttgtctagtctttttctcccatgtaagtaatttatttaaaggttccgtataatccgtgtcttgtaaaatcaatttatcaatcttaggaaattcctcctttaaaatatcactataatccttttctgctttcaaaggtgcgtctcttgacatggctactgctctaattgtatatgcgaatatatttcacttgtttatatatatcagtgaagtaacaccaaattggtgtaaaggatctacacactaaaaactcttcttcttcagcttctgtatcgttttcttcttcttcttcaacttctctggcaacaaattcagaaggaatctctctattcttttctggatttttgccactaatgctttatttgctttgtgtcatctcacacgaccatgtccgcattcggtcatgcatggtgtctggacaaaacaggtgaaagaaaatttttttttaattttttttttttttttgcgatgagccgttggtgctgtgaaattcgaaaatgtgataataagaaagaagagatgagctggaagttgacgtgagcctgccaaataaatacaacattgttgagagacaaaggaacagatatatcatcatttcctctattggtattactcttgatcgatagattatctgcgtgtgtctatgagctgtgatactgcttcaggaaaaaagtaactttggtgaacatatttgtccttgagtgtgtgtgcgtgtgggtgtacatttgtgatatatatatataccatatacatattcttttgaatagtttaggtgattaataatttcatacactggtataaactagtaattaaaggcaagaacgaatttgatacgagtaaagatccaacatggcaggctcacagttgaaaagattaaaggcaacattaagagcacatggactcactggtcaagcaaacataaaaaaaaaataaaaaaaattcaaagagacaagctaaagaatatgaccgtgaagagaaagccaagactctaaataaaattagagaacaatttaacccatttgagatcaaaaacacaaagagtaaattgtataaggctgatcccaaaaatggttctatagccgttgggaaacctggaatatctaaacaaataggtgaagaacaaagattgaaagcctataatgttaaaaaacaactgaagaatagacgcggaggtatcaatgacaaaagatttggtgaaagagatagaaatttgacggaagaagagaaaatgttggagagattcactagagaaaaacaaagtcaatccaagagaaaatcaaatctatataacctagatgacgacgacgaaaacgatgaatatggaaacgaattcgagaataatctaactcatctgggtagtactttatcatacgatatggatgaaaccgataattttggtagtgataacgatgaattcttttcaactaaaaataataaaaggtcacactatgaagaagattctttaggttttgataatttaactggtccaccaaagaagaagactaaagctgaagttatgcaggaaatcattgctaaatccaaattctataaacaagaaagacaaaaagctcaaagaaaattagaagatgaaattgaaaatgttgataatgaatttgatgatgttatggctgaattattcgattctaataccagtgcttttcaaaaaccagcttctaatgaacctattattgaaactaaatcagagaaggatattgaatatgatatgaatgtgaaaaaattcttattagataaaagagcagtcccagctgatagaactaagacagaagaagaattattaaaggaggctgaggaaaagaaaaaaagattagaacaacaaagattagatagaatgaacggaatttttgttgatgaggatggtgatgaaagaggtgtggaagatttagatgatgggttctgggaaagtgaaatagaggacaattttccaaatgaagaagacattattgcggattcagatgatgacgttaagtttaaagaagatgatcaagaacaagaaacgactaatagcaaagaaaaagataatattgcaagaataacagtgaataagtctatttcatgtccagatgatcatgagtcattattaaatattttagaacaatcctcattatctgatcatccaaaaattattagaaaaattattagagatcatcaaccaaaattagctgaaggtaataaagaacgtctaggcaaattcaccgctgttcttttaagacacatcttgtttttggctaccgaagattattcagaaaatattgcagaattcagaaaagttcaagaatccttaatatcaattttaaaaacagtctctgaaaaatacaataaagaactttccaatgaatgtagagttataattaaagaaattcaagaaaattttaaaaatgaaaatttcaaatccctcaataatgatgatctaatgtttttcattcttgttggcgccattttttcaacatctgaccattatcatttggtggctacatcctgtgtaattttaatggttgaatttttggaacaaattaagttcaacagtctatctaaaatttcatatgccagtgttattgttaatattctttcacaatatcaaagaatatcaaaaagatacataccagaattggttttcttctatgaaaaaattttagcgacatttatcaacattgatgaaactatggctatcaggatagatacagataaattgacttttaaagatgatataagattcgataacgatgattcatctataatacatttacatgatattttcaatgaccaaataaatcaatctacagattttcaaaaatctgttcttttgaatattttacattcattagattcaacaatctccaacatttggaaaaatctacctgcatttcctgaaatcataattaatattaaatcagttttgtctcaatatatacgtagatttgagactttaacaatagccaaaaacattttcgataaaattatcaagttagaaaaattccacaaacatataccgttaacattacaaaatcacaagccactatctattccatcaaatgcgcctaaatttgaagaaaacttcaacccagataagaaatcttatgacccagatagaactagaaatgaaattaataagatgaaggcccaaatcaagaaggaacgtaagtttactatgaaagaaatccgtaaagatgcgagatttgaagctaggcaaagaattgaagagaagaagaaagcaaatgaagaatatcatgctaagatggcccgtatctataatactatcagtactgaagaaggtgcagaaaaaaacaaatatgaaagagagaaaaaacttcgtgctggcaaaaagtaatttatataagataatcggttatttaaaatatactaatttctagatacaggtatgtcttcaacccaaaaaattttcacatatttgtaaaataaagacaaatcccagtatttaagcatttttatagtatttatttcattagatattattatttgaaatattaaatataaaacaacatgagaacctgatgaagtttaagaattacaattgagactaattatcacagaaaaaactgttgcaattattgtagcagcaccacatactcgcttaatgacgtttcatttacgatacatacctgctatttaatgagttttatattcaagttttcattataacatattaaaaaacgataagacagtttaattacaaaatacagaaccttttaacatcattttttttataacccatagtcggttattgttcttagaaatatatatttcaaggtaattgaaatattctcgcatcttcaaatatattgaatttattcggacatatttgtagagaagatatagaaaaaataaatattcaaactataattaaacatttgacttttcataatattccttaaccagttttaaaattccttctctttttgttgattctaacccattgccggctccaattgtgtgattatatactgatgacgaagatgaaagtttaataaatgaatttgttgtattattctgatacaactgatcatttctagaatttttgtttctatatctatcttgataattagttaaatttgtctgaaataaccttggattttgtcctggtttaaattgcttttcccatgaatatttatattgaccactaattttatttgtgccatatagattctgatttccttgaggtagctgatattttccaaaggttttctttttaccattatagtcatctgcaaaatataaatatgattgtatcatcttatttaatgtatcttcattaacactcaagtcttctaccccaccaacaatagcagaattagtcaagggtcccgaagttaagttactaggtaatgtttttgttcttgtttccatattatcaaacattccgaatttacaaacataccctaaaccgtctacatatacagacgattctctaaaaaaatcaattatcgaatcagttgattttggtagtgagaaccacaaaatgaaaggggtagtgattaaacttgtcagctctttaaaaagtaaaataatcttcaagttgtaaaacatacaaaactcgtctttcacctcctccatatgatattttccctcccattcctttggcaaataatgtgtataattacttaattcctttattttttcttctggctcaaaaaccgtgtacactttagatattgagttatgcgcgatagtccaaatagaaccaaataaagttaaataaaatagaactgatttattttctgtaatttcaaaatttagaaaataatcaggatcaaaaatagttaatatagccaaaatggcaacaaatgaccctgatataaatgaaacaaatttcattataatattatatttttctctaggaaactgattagtatattggtctgctataggtatgctggaatctattcttttcttaaaaagatgataaagttcattatactctctaaatttccattcagcaaatggtgtatattgacgaacaccaattgaccctggggacgttttatattcattaaaatatttaaaaaaataaagtaaaataaaataggaaactaagaatggagataaaataatatttaaaaatcctgctaacatgaatcttttattcagttcatccttaatatattgtctttgtgattttcttaaaatattttgttttaaaaatccagattcattgaaaatgtaaccgattacacataaatgaatgttccattctaaagtctttgttaaattataggattgtgacaagtgagaacttaaataagatgacaatgacaatggtaatggcaatggtaatgacaaatctaatatattattattaaaaagagcaattaaataattttcctttctcataattctgtttgcaatgtcaagtgcactgattctatttttagccttaacttcaactacatttgcagtcagtgcgttttgatcttttaatgaaatgatttgatttaccacattttgccagggaatggtttgcaattcaccatcattaatatttaatagatgattataaaagttttttatgtcaattaaattcttataatcaaaatataattgaattaattttaaaaataggaaaatataaaatacccaaagtaaaactttaataaagcccgttatgttatttttatagcattgatcttgagatatttcaaaccaactgtgtgcttttggcagccgtgagtaatcaatacaataacctaaataagtagagacgtaaacaacaaacaataaagttagcaaattcaaaactttttgtaacataatacaaagaaacccgtttcccaagtaataattataaacatcttgaaaaaaagtatctaaattatcaatattagcccacttccacaaagctttctcctttgcatttagtgtatggattttatttgaagatgtattattaaggatagaaatatgtcgaagaatgcttggccttttcggtatattatctgtattttcttctttaaaaataaaacttttaccttcttcttgtatttttttatcaatatgtgtattaaaatatttattaaaatactgagagtatttctgattaataagattggaatctaattggttatcattttcagtctgtttattctcagaatcaatattgtaaccatctatatcaacgcttttattattattattattattattattattattattattattattattattattattattattattattattattattattattattattattattattattattattattattattattattattattattattattattattattattattattattattattattttgaaactgttcatatatggagaattgacctactttaggaacagattcaatgctttcattttccacattatttatttgttcttttttagttaagagtatatcagattgagattttagtgtatgattatctgactcaatatttactaccaaggatgatggagaagatatcgtagtagaggactcttgatctgattcaggtactcttgacgcatagttatgaatataatttggaagaatattaatattacttgtaatactttctctagagttacctatattattatcagtgtcatttatattgttattatttgattcttttatttcaagaggaaaagcactcatttcttcactttctattagttttttagcttcatcactttgaattccaaaaattttcgacaaaaaagtattacgtttaccaacatggtttatttgactctctggatcatcaattggttcattttcatgtgtatattcagatcgaatgtccattgtaggttgttgtaattgacaaaaatacacatataaaataaaaagattctcagctgtactagtcaaacaacgtttttcttattccttgtataaattatatagctttgacgtcatgccataatacctaaaaaattaattaataaaaatgatgttgaagcgttgtgtaaatttccctacatcattttctgtttttatgaagtttcctactctctttatatatatatatatatatatacgtgtgtatgtgttgtgtattttattatttccacaaaatttctttgcttttgatcggcggataaaaccagcaaaaaaaaaaggggagaaaaaaagtagtataaaaaaaaaaagttttagcggctaaaatagcccaaaatagaaaaatacataaaaaaacagtgttctttgccgtatgctacgataattacctggatatgaatatatgcaatatgtgatcaatacagtatataacatatactgtataacatatatctatatctatatctatatatattgataagaatgatagcatatcaccatatccttgttaaacggtttatcgtaccaatatatttttcaagttccttctctttcaaagaagttaatgctacagtactattgaaaatgtcattaaacacctataaaaagtttggagtaacaaggattctatcgcaaactctacctaagtattctactgtaggtgcttcttcatcatccatatctaatgccactatatcttggataaatgatgtttcggcacctctacttacttccattaccacctcacctacacgaactgtgattttaccagatttatgaacccttaaggacccaattcttcctgttaattcttcttgtggaacagcagtaatcttcttcttattcttcttagctttagtcttttttgttgttggtttttttgtgtcacctttaccattagttttagtactactgttatcaacatcgtcattctttttattattgttattattactatcctctgtttcttcccccacttttacagcttttgcatttgtttcattttcttcatccttagatgttacatcttggaaagtgggtaatgcatatggtaattggaacaatataaatttatcagttttattatttactctttttaacttacttctcaatttttcataatcacgatgaacctgaatagtttcgatcttcatttccttagcatcaattgactgagattctgaaccaatatccaatctattcaatttttcttgtaattcctccctcttgttttccaaggtatcaataagggtaccattaatattatcatcattttccatctttatatcagaggatggtgaagacacttcgttatttaccacaacaccaggagtttgttcacgtgttgcagcttcagtcaaagattcttctatatccttctttagtacatatatatcctcatgtctaatacgtaatggtctaactggaaacatctcctcaattcttctagcctgcaaagcttcgtcatccagttctatgtcactattgatatcatcctcatccaattcaaaatcatcttttccaactctatattctctacccatattgaatttagtggcgtgatttttagaatctttcttttcatcaacatcattatcgtctccaaaactaccattttcatctacatcagaatcatctgcattattttcaatggttaataaacccttcttgactaaagaagaactatcaccttccactttaacaaatcctcttctggccatacttcctccaccacggccactgtcaccaacaaaattacctgcagctaatggaccagatgaaataacatgtgtgttggctaaatacctggggattcttctctgtctttgattacccatccgattctgttgattcccattcttattatcctttttttcaattgatacttctgtttttacctttaatgctgatgcttctctttcttcctttgatcttcttgtacctgcttttggtttaaatttaagcgtggtcttttttttcatacctggattattcagtgtatcttgtgcagcatctcgtaaagaaggtaaacggccagaactcattatgtgtagactatctctctgtgtattaagcgtattcttactattacagttgttatccttactttatttatgtctacttgattaataaaatagtgataactaaccagtcaatgtaaattactatcaaaaacaactgacttctatctatcttaatgaatacaattctcagaactgctgaattatgcttatacaaacccacgtttcttgtatttttgattaatatatctgctctttgatgagcatcttgtatacaaaatttgcaattttcttttcatttatgttgtaatttttttctttttgttgtttttctgaaaatcatagtaaaagaaaaaaagaaaaaaaagtatttagagataaaaaaatttttttggagatcatttttggctcatctcatcctttcacagttatattagtattgtgtactttatgcttgaaacatatataccaccaaactgttgaaccatttcaaaaataacagccttaaataataaattaattgccaaaatggtcaaagggaaaggaagggcatccagaagagaggaggaagaacaagatccatatggtctgaacgaagtagatgaatttgctgctaaaaatgaaagaattttgttagaaaattccacattatataatgaaaatggacaaactgatgaagataaacttgatgacgatgatgaagaagcagttatggatattagtgatattgatgaaagtgaagatgaggatgaaaatgaaatgcaagtggagagtgaaaaggcgtacagacaaatttttggtcgtagtttaaaggatgatcaaagacctttagaggatgaagaggctattttagataacgagaatgcctggggttcgactaagaatgaatactatggtgctgatgatctggatgacgatgaaacagctaaagaaattgagaaggaagctttgcgtcaacaaaagaaacatttacaggaattaaatatgactgattatctagatgatgaaattgaagaagaatgggtacaaaatgcaaaagagtttgatgtctctgaattccaacagtctactaggcaaactagtaataataatatttcattgaaagatgtccgcaatatgaaccaagaatctaaagagaaatacttcaaaaccatgtttccagaatacctaccactttgtaaggaatttactcaattgactgaagttcttaataaactgaaaaattcaaaacaagataatgaattcgttaaaattaaagccattgcactttcgacatatcttggttcaattgctgcatatctaggtgtgttatcccatgaatttaataataacgaggactttacaaccatgaagaatcatcccgttatggaggccattttaacaaccaaggaaatatggcgacaagccaacgaattaccaaatagttttgactctaacactcaaaaagaaaggaacacaaattttgaatatgatgataatgatatggttgaagatgttcaagaaatagataaagaaatatttaacaacattcctgggaatgagaataatgagacagacgacaatgctgataataatatggcaaatgaaaatgatagtgacaacagtgacgaagcagatctagatgattttgaggaatatgtcggtctatctcgtattgatagaaagtctccaaagcaaataatgacatttgctgataaagaaagtcataagactaataatgtcgaacttgttgatgatttcgttgaatctgagatggcagaaattgatgcgcaggaaaagaaaaagagaaaaaaatctttacgtttctacacttctaaaattgatcaacaaagtaataagaaaatggatagatttatgggtgatgatgatatcccatacaaagagagattatatgaaagacaacaaagattattggaagaagccagacaacgtggtctccatgataaaaatggcacagacttgggtgtcgatgattatgattcccaagaagaggctgcaatagcaaaatcggttaatgatcaaagtataaatgactattatcatcaaattcaaaggaatagggaagaaagaaaacagagccgtaaagaggcacataaaactgctctgatagctgctagagacggtaagttagctgatgccatagaagcagttggtgaagatggtaagcgtgcaattaactaccaaatcttaaaaaataaaggtttaacgccaaagagaaagaaagaaaacagaaatgcacgtgttaagaaaagaaagaaatatgaaaaagctcaaaagaaacttaaatctgttcgtgcagtatattcaggtggtcaatctggtgtttatgaaggtgaaaagactggtattaagaagaacttaacaagatctgttaaatttagaaattgagctcctataaattaaaatgatgggattgttgatgagcaagcacctaagaagatatcatttcaaatatattctaggcatgtggtttattgataataaatatggtattgtaatatataattctatatagaatttttaaatacgactatactaaagcaaaaacagtgaaacattattataataatttccccatcgaatcttgttttaacatcagtggatcaacttcacctgatagtatatcagttaattttttctcaataattcactacttgtattggtttctaagtccaaatcccatgataagaaagccttaataattttttgtttctgagcaaaactttgtctatcttcttcggtaatcatctgaaattcatcgtaaagatctagaccttgctctaatctttcatttaactgaactgccctctcaagaatttctttcctcattccacatattttggcacaataaattcctaaagaatttcttgatatccccttttttattttaaataaaaaagttatacctatattttcatttgttatatttttgataatatctatattttcagattgtataacatcagtttgatagaaagataccccagaaatgtttgtagataaaacattggcatgaaataacccatgaaaatgtgtacatgcaattgttcgtggacagttaatcttttcagataaaaaaagaataatagcaccaaataaagctgggccatctaccacatccgtccccttaccatattcatctattaataacaaactcttgtcgctacatagggctaaagcttcagaaatttgttctgagtcgatttcaaatgaactttgaattttagaaatactttcctgagttctgattcttgtaaatatcctatcaactatacctatctctgcagttaatgctggaacaaaacacccaatttgtgccatgtaaataagtaatcctacctgggataagtacacacttttacccgacgcattaggtcctgttaatacttgaattctttcattattttgtttattccattcattgtcttcaaaattacccccttctatataaatatcattaggaatataattttcaagaaaagtttcatataatgggtgtctaccttctgttatgtttattaagcatctcttatcagttataattggttctatatagtttctttgctttgaaattagggcaaatgattgatatacgtctaattcaccaagcagtgtataaaactgacaaaacaagtttgattctaacagaagttcttgttttagattataaagaatttcaatttcaatatcaacaatcgttgagtaaatattgccatatttatttgtcagtgattctgtttgtgacgttctaaaataaatttctgtgtctgttctaaatatttcttcccaaccaagactactaaaacctacaaaatgatcttcaacaattttattaaccgttattaagaaacttaactccggcaaaaataaacaattagttaatttatttgtagatttattgtatattttgtccttctgtgtttcagttaatatatccaatattatattttcagttgtattagtctcttctattattagatcttcaatatgttccgcaattgttcgaagttcttctaatctttcatcaatattgtttgagactattactctcttcaattcttttgatatatcaaaatcaataacattttgaagaatctgtgataaatggtgaaattttgtaccatcaatagttgttcttatatggaatatcagattattggagtttggacattttaaagaacaaatgatttgaaatattgatgctgcagttgttagaaacttatctaaattaagccaagtttgaaatgtttctttgccttgttttagctgattaataactgtaaaaatatcaggacatttcttaagacaacttctaaaatcttcaaaatgtacagtgtttgaactggaaagccatgtctttatcatggaatatcgttttttaatttgaatgacatcagtgagtgggaatgtcaaccacgaccttaaaagtgtctttccatatgatgttgatgtataatttaaaagctcatataaggataaagacccgttattagctgtattagaacaggttgctttatactgcgattcaaaaatttgtaaagaatagaaggcatcgttaccaagaagcattctattatttatctctattatttcaagtttatttacgaacgcgatattgttatcactagcatactgttcagtggtagcatcttgtatatatgaactgtcaactgcagaatactggttataaaagaataatatgcagcaaacagtcccaaccgtacattttgttccaagttctttatgagctattaaattttgaagaatcgaatgctcctctttgctttcaaactttagtgttaaaatatttgcaatttttttgaagtaccggttgctctgaagttccaatttacaattaagctcattgcatttgttagagataaattgatatgtactttcatttaaccttgaggatactaggcatagattcggaactaatccattaaagatttgtccaactattgtgtttatttcaccactatatttgttcaactcatcaaattgggactctccagaatcatattttctactaagggtataatccacaggaaatatttttagagttccagtagaacaatctataattgaaatgcctaatttatttttattaatgtctaagcatataatttttgaactttgagaatcaaaactatattccaaaaagctttggtcattatatgtgtcatttgatcttagatcagtcatttttttgttgcttttggtgtgttttctgtgtattgtatgtaaagtttgttagctttaaatgtgaaaagtatatagcataattatagaaattctgggcggctaacatttatactatattaaaatcagaagaagtcatatttctaaggaaatgttacactcctgaagaaaaaattgtaaaataaactataagctatagaagcacattatgaaatatatgtaataccagtggaataaaatgcctaccaaaaaaaataggagtagttcgtattaatcattaataaagaaacttttgtttaaaatagaatgtattgaaatgtattgatatatatagaaatggttacataggattactataaataatcaaaagattgttctgttttgtgtatataaaacgtatagatagattaataggttttaaaagaaatgatacattaacgagaatgtatagagatatactgtattgtgaataaaattattacttccaatatgacaaaactaccaagaaagtaatttcatttcttacaaatattaatgacaaaaaaaatgcatataatttgaaaaagaatgccctaggttgccgattgttattttatttatccttcttatatgtcttttttgtttatgtggctgctattacctcgtgaaaatgcttatctgaaatatcttaattgtacattatttttacttggatttctctcgtatttttttttctgttatagttatccacttttcgacgatttgggaacatgatccaaaacggtgatgtgaatacttttcataaatagcattatgatgtgcgggtgcgtccttacaattttcaattagtaaagatgctaatggtattaattgttgttgtgtataaccggaataataaatatgtttttgtgtccatgaattataacctaatataactcgactcagaaaatatgctcctgcagcaagccaacttggttgagcggatactaacttagaatccattattgtagattctaataaatatttagccaatgttctaatatcatattcataatcgtctgctttacttattcttcgcagaaatgacataggaccaggccaaccaatctcaaattccaatgtatctattatatatttttctgctttaataataccatctctatcatatgcgccatcaagcatatatatgatttcctttaatgtgggacaatgtatttcttcgtacttacatgcaataaataatgctgatataccaaccaattggaatttatctaagatgatcgtacttttagataaaaatctatcaataatattaattgtaagatataatgtctctggcaaaagatgaaatctttgatgaacttcaataatccaatccataagaattcttctgtatgaccatttcaaatttggttgataatgcatataattgggatcgggtctatatttttcttctaactgtttcatgtaatcaaatatgtcattacttagttcagataccattacaacatcatatgtatcttcatccatgggatctggcgtagacctataatatttttgataactttcatctatcatctgtttacttacatcatctgatcctggttgcatgggtttccttagaacgtcattattgtcatcttcctctacatttgaatactcattagatattgttgcttcatttcgttgttgttctgctgcaatttctgttatatttctattatatgtctctccactttgatgtttattccatttcttatcatgaatattattacttctgtcctttgaattatctaaatcaacgacatcagttgaaattctactattttcattatccaaatatatttggttgagttgttcattattattcagtttaatattttcttttcttgaaaaataattaccatcattttcaggtatcaatttttgtttattttctacttttgaagtcacatcagaaagtgctgttctatgtttaggtatatgtaaaccagaaaaggatgaagtcgaatttctatttgatgaagttgttgagagatgatttatatttgacccaatcgttgctcttgataatatcgtagaattactagcaatgctattattatgattattatatttcatactgacattttctgctgccggttgattctccttatccatggaaatatcctgactaacatctgcttgtaaatttttagactctgcatcaatattattgtttctccatttgctctccataaatgaattggtgtgtattatgttatctttggataaagaaggtatgattgatcctgcagaatatgaatggtgatgataattgtgtcttgtttcattcatatttttaatgttgatattttgtgttatgatcagttgatcaaaaaaaaaaagtctaatgtaagcagtagagtagtaattagcaaaaaatttctgttgatagaagataatatagcacttaatgtaaatagcaattaaaaaagatgcaggaatttattgaaaaatagtaattaaaagctatgtatttaggaaggaaggaagagagcaatggccaagcaaaacaaaagatgatataaaacgtttataccgatagattttatgatgttggatattcagctaaattattttttttttaaatagttaaaccaaggtttttttcttttttatattcaattgcaaaaaattagttttgtctagttttagtattttcgatctgtttaggtttattcagaaggatttcaataattttaatagtaatgtagttgttcttcttgttgtttctatagttgttgtatctttatttatgagatcacaaatatgaaaatgtaaacaaacaaactaaacaacaaacaaaacaggaaattatgaaaacaacaatacgatatcgttttatttttttttttcgaaaaaaaaataaaaaaaaacaatatttaaaattttgttgcgaacttaatttttaaggcagatcagtcctgttgaatttaccctcttgtagccttactaaatagaaaacacatcaaaaacaagttattagatgttataattggttgtaaaagtattcaagtgatataaatgctcaatgattgacacattagagtgcatgtttctctatttgtgcacctttcttgtaaatagttgtctatatgtcttgtaaactttctatactttgcatttgaattttatattcattttttgcaggtttaatatacattaaataaaataagaattcaaatgaacaaattcgatttcaaaagagtagaattaacctcaaataaaagtcacataacgtttctgggaggttttttttattagatgattttaaagtacagtttaaaagcgttttatacatacgtataattctatgtaatgtctttatggttttgttgacagtattaaaaaaaatatgaaatgttggtagacagtacaaaatgtacatattttaatagtattttatgattttgtgaatgaagcagacatcattaaatttgataatatatatttccaatgataaagacattcataaatgatatacctatacaaacatacagatggttcctttaataatctgattttattacacaactgtattgttttctatctaattatatacacatattttaatcgagacatacttttttctcatagctcctaaacttttgtctataatctttcttacagtctttttgaattcagaacttggcaagtgaatgaataaatcaaaatttatcgtaagagacgaaaatactgtgaaataaatttctcattcttcttttatttatgtagaaggtgattctgcaaataaaaacacttttccacttgagttgcctccagtaatccaactttgagagggatgccaactcactacagcaggaaccgtgggtgttctcatatgagcaagttgttgtccctgactagtatatatatcaatagctctactcatattagcaatggcaaaaatatttttgttaggtttgaatttagcttttaaaatactggtccatctcccagtttgacaattgtgtttaattgttaatttgggcactaagtcttcagatgttaaacctgtatcactaacatcaaacaatctaattgtatcatcgtatccgttacatactaaagtattatcattgggagaaaaagaaacagctgaaacactcaaacgagaatcatattttgcaactacttcatagcttgaaaaatcatcgtactgtgaccattctggttctttgacgatttttctaatatcccatagtttcaaagttctgtctaaagatccagttgcaatctggtatggtttttgggggttaatacacatagaaccaattttcttatcggctaatcttttgaaagtaatacttttattgttttctcttacgtctaactgagtaaattcaccacttagagtagtgatatataacatattgtggtcagaataactaaactggcaatcactaactcctaagatatcatcgtattcattctttagtgtaatcaattcatcgcttttcaatgattctaaatttattgatctgactctaccatcataactagtagctaataaattttcagattgattaggaaaacaatctattttggatatattcttattgaataattggaatcttgtaatatcttcgtctggatcataattgtcttctataaattgtttaaagttagcattccaaagaccaatattccctgaaacatcacctgcaataataattttttgatttttatcaggatgagtataaagagaggagattctctcatagataacttttgcttcaatcatattcatgctttcatatttatctgatagagacattaattcaccttgatccacattattactctgttttctttgaaattcacgcagctcattgaagaaatcaccacttgataattttaacgagtttaatttatctagtttctctgtatcctgtattatatcagttaatttaacatcgcccaagattttaatatcttcccaaggtgcaggtgacatattgttttctccgttactcacattctttttaggttctagattgtcatctaagtatttagaagtttcatcgccattaattgtagccgattgaccctgtaaacgacgcgatcttctagttggtatagcagcaggtttctcctttttaactcgtttagtagtctttgaaactgatttcacttgttttttcctttggtgatttggtgatctcaattgtgtatcttttggaagattaataatattatttaaatttaattttttcaatagatcattatttctctttatattttccaatcttttcttttgaaagcttgttaattctttattagtgttgttcataatttgaaattgggttggctaattcttttgtttttatagacagtgatcaaaattatacagggtatagcatacttagatatagatatattttaactacaggaagaacttttaagcttctaaatagaagaaagaacatcaaaagacaagaaagaataaaaaaaatttaaaaaaaaaaattcaaattatattgagaataatagcttaagacatgagtgatcgtagcaatattttaaagatattcaatcctcctaaacctaatggaattggtgaacaaaataataacaatcaagataaaagtaaggtagatgaagattgtattggttgtaatgcattcagctccctattttcacttgttggtggcagttatctcttaagtggatatccaacaagaaaaagcaatccccaatggactgagcagcagtataataagattcatccaaaatggtggagaacttcattaagatctgtaggtggacttgtagtcttttttggtctttatagagctgttgaaacctatcaattgtggagaaaattagaaaaccccatttcacaataatgtaaaaaataaattctaatggcaactgtgaacacctttgttcataaagcttatgttttgtcaataatatcttatatataattatataattaatataactagtaaaaaaagcaaaaccaaaagaaacaaagaatttgttgatatctattttcagttcatcatggtattatattaaattcttttgtatgaggagccaatttagaagagcagcggaccatagttaagaaaatacatgaagagttgaattataacgatgatgatgtccaaatctttacataaaatgaaaaaagcatgcaaagaaaaaataatcatctaatatatataatatatatccattaatattactttattttgtgaaataatttattttgttctggctaagaatttatgttactagttttttttgcttcaagttttgctctttcaattacttcttttctaatttgtcgatcttttctaatctttgatttgactttcttacaccaaaggttaaaatcctttgaatattcactagcattatcattgtattttaaaacaaatatatgagataacatttctttaatggaaggtctttgttttgcatctttaatacaacacttagaaacaaagtctatcatatctggtgggaaattataatttggatcatttataggtaagcacggtgcactttcattaacaattctttgtaaaagatctagtattccatcaggtgtgtcattgtgtccacctaatgggaattcaccagtaaccaattcaataataactaatcccaatgaccagacatcgccctttgccgaatatacatttccttgaattctctccggagacatgtatgttgacgtcccaacgaatgtgtttgcaatagaattaactatctgttttgagacaccaaaatcacatattttcacttcaccttggcaattcaccaaaatatttgacggcttaatgtctctatgtataatcttataattatcatataaatatgctaagcctgtcaaaactgcgtatgatatttttgatattaccatagggttgttaaaccatgttttattagcatgggtcatttttctatttttgaaacttttgtaaacagataatattttatcaagagatccacaatccatatactccattaatattaccaagtcatcatttatactatggttgattaaagccccataaaacccaatgatgtttggatgtttcctgattgccttcataatatataattcacttattaattgtttagtgacaatctcgttatttttatcaataggaatagtttttttgcagagtatctttgacgttggaacatgtaaaactttagttactgtacctgaattaccttcaccaattttccctaatcgtaccatatcttgtagttgatatatacattcttctttacaaataacttcttctgtagatgttgtaactgtaatcttttgaatatgatggaaatttttatcacctgatagttttggaatagatgatgtgttattgttggcaattattttattgttgctattattataattccatttagtgttggatgttatcacagtttttgtcggtgaagtaaagctattttttaatggtgaggatgatatattcgaatcaggagatgatgaaatgtatgaggatgatgacgtcggggaagatataaatggaattgaggacgcagaaatctgtaaagaattagagtttgattttctagcagtattatctaaacgatgattaaattttcttcgtaaggacattgattggaatttttcaatttgttgtggtatattattaatggttgtattttttgtattattatttattgataaggatttcatgttattttctaaatttggaatattattattatctatggtagtaatagtgttggtcttaacgaggggttcgttttgtgaaattattgagggcagattggatagattttgattaataccatttttttgattattgctagaggacaatatcaaatgttttagattttttctttgtaatgaattattctggaacaatttttttttggttttaacattgttaatactagtaatattatctaaagaagaagacatagcagtagcactattagaagaacattctattgtttgtacataaatgtccattgtaatttccagtaaaaaaagaaaaaaaagacagtttatatcaagtgttggtctatcagtaatggtagtaaaagcatatgcacagagaaataaatggataattaaaaaataaatatgtgttatgatagaaaaaggttttttagtagactgaaatacttttattttaaagtccagatacaatttataaagcgaaatcaaattgacaaaagataagtgtaatagaaaatcgaacagagaaatgtataatttgttttgttttatttttttagtatgaatagtgctgtatgaaggttttaataaaaataaaaccactgattctgagtcttattgtcttattttatcatttccagatatacacttctatatattcataaagtggaagagttaatacaaatatctttaaacagtttatccaaattttgaactttttcatcaatagcttaaaaaagtcattaaaaaataggctttttagaaacagtattgttcttttgaaaaataacaggaaagcaaatttttttcactgaacaatagatattttcggaaaattataatgaatagggagaatagtttatagagacaagtaaatagtcagttaatcagtcaaacaatcttagctagatagctttctgctgactctcacaaccaaataacctaattgagggactaaagaaaaaaacaaaaaatattaagacagactatgaacaagtaaatatatcaattcgttcttcaataccgcagaactaattaagattctaatctcatgctgtgttaagatatcaacttgatttcctaatagtactgacatcgttgatcttcccctccagctatcagttagttataagtacttatttactgataacataaataatatgatgtactgattctatttcagaatgtttggttgatatctgtattaaactatctagtatgatgaaattggagagtagttttgtctaattttaacaactgaaaataaagttattcttcaaaaagttattttcgctatcttcatgttctttcgactctaattaatatgacgtgttgtttttattaccttcatgatcactgctatcgctactctcattagaattttattttcttttgtttttttttaataaaacatcctttatatcgaattaagactgagctacctttttttcaggtttattatgatatagatttctatttaccagtaatgatgttgtactttaaatataggatctaaattttaaaaatggtattatagtgctattcaacttttcgatggaatattttaataaagatctattcatactgtaattgctaaatttctgttgatttgattgggcatctaaagattcaaattagtataaaacttccttctattaatgttgttctctttaatttcttgctatgactggtttatattattttttttcatatttttctagtgcacagatatatcggtgatatgctttctgaataatgaagatatattgagtttactgttaagatttgggattgtattctcattgggtcttgatgtttttaatgcaaaaaaataaaatccaattgtaatattcttttatattttagttgattatgttttaaagatttaaaatatgatttaacaagtgtgttggtaaacatttgattttacgaattatacttatgatgtcaaaaagtattgcttacaaagatattaaatgtgaaacattttcttatttctcactagaatatatctgtaacttgtattcagaattttgtcgtgcaatttatctgattttttaacagatcagacataatgtttggtgattgttcaatctcttcattgtctcaataaaaatattcagtattttctttagtaaccatagtaagatcagtttttttttttcattcttttctccatttattgattctgttttgctccttttaaattaaaaaaaaaaaaaaaaaaaagataagaaatagtatagcatgaagattgttccatattgtagaataaatattgattaagtattattgtagttttttcaggtaattacttactaatatatcaagaaaaaatattttgaaaatattcaatatatatatgtttttaaaaaagaaatatcaatattttattatctttaatgttttttctttttttagaaatttattaaaaatactcttgggaaacaaataatagattaatatggaaatatttgataaaagaaatttaataaggttctttactctttcggattataaaatggatatgtttaaatgagtagatgaatgccaagaaaaatttataggatttttgtcatataattatatacattccaaaatactatatatttattttaaagattttttttgttccaggtttctgggaaaaaaatatgttgcttcataattattttcagtccaattttctgaatctttttttttttttcgtatttgagaatcaaagctataaacaaagaaggatttccttttgaaaaacatactttgctgtgctttcattaaaacaacttactgtttttaataatgtcatatttgctttaatctaagaactcgcatgtagatattttgtatttcacacacagtatatttgcttgtataaaaacaatagaactgaatatgcattatttttaagaaaagacaatattcgacagctttcgtgaaaaataatatttcaaaaggttctgtcattggctgcacaaaaaaaaagaaaaaagaaaaagaaaacagaaaagctcaaatagtaacagccttacaccacatacaacagtttggtttttttttctcgatcagtgttttttgacaagtgctattccgttgaaagtgattttttactgtttcgtgtcctgtgattaaaccagaaatagaaaaaaaaatatcgttgaaagtttcaaaaacaaacaacaagaacacaacaaacttggtgtaccttttttttttcttttatacttgagtactctactagaaactttctaatttatggacaaactgattgttcactctataacctattcttccttcactgtttattaattcttaagagtataatcacacaacttttcctatatattatctgacttattttttattgatttattcaatttcaaaattacaaggataagtagaaaatattaataaggacgctcatttctttgtttatttagttagatattagttctttatcttttttttttctactttattattttgtcaatatccaggactaatatctaaaactgtatattaattatattgttatatattagaggtatattaagaagaagaaatttttttttattattttaatctgttatagttgtctttttaatatttctttttttatttcctttcagttattaagcttgtttaactataccactaatacatttacttttatcatttgttaactatccaattttgcatatacacatatatcaatatctactaagatcagaaattatattattttttttatttggaagcaagaaaaaatttgagagtaaactaggatttaaaacacgggcagttaattgtttttaaatttcttatttgtaagtttaagatgagtgaagattggaaatcgcaattaaatattcctaaaaaggatactaggccacaaactgaagatgttctgaacactaaaggtaacactttcgaagacttttatttgaagagagaattattgatgggtatctttgaagccggttttgaaaaaccttccccaatccaagaagaagctattcctgtggctatcacaggtagagatatattagcaagagctaaaaacggtactggtaagactgcagcctttgttattccaactttggaaaaaatcaagccaactttaaacaaaattcaagctttaattatggttccaactagagagttggctttacaaacttcccaggttgtcagaactttgggtaagcattgtgggatcacttgtatggttaccacaggtggtaccaatttaagagacgatatcttaagattaaacgacactatccatgttttggtcgggactccaggtagagttcttgatttggcctcaaggaaaattgccaatctctctgattgtaatttatttattatggatgaagctgataaaatgttgtcacgtgatttcaaaaccattattgaacaaattttgtatttcttaccaaagaatcatcaatctttattattttctgccactttcccattaactgtaaaagaatttatggttaaacatttgaataaaccttatgaaattaatttgatggaagaacttacattaaagggtattacccaatattatgcttttgtagaagaaagacaaaaattgcactgtttaaacactttgttttctaaattacaaattaaccaggcaattatattctgtaattcaacaaatagagtggagttattagccaagaaaattacagatttaggttattcatgttactattctcatgcgagaatgaaacaacaggaaagaaatcgtgtattccatgaattccgtcaaggtaaagtgagaacattggtttgttcagatctattgactcgtggtattgatattcaagctgttaatgtagtaataaactttgatttcccaaagactgcagaaacgtatttacatagaattggtagatctggtagatttggtcatttaggtcttgccattaacttaattaattggaatgatagattcaacctttataagattgaacaagagttaggtactgaaattgctgctattccagccacaattgataaatcattatatgttgctgaagactcatctaacgtacccattccaatgactataacggataatcaacaacaccaacaaccacatcaacaaaacactcaaatatcgcataacaataatatgaatacaactggtagtataaatattccaccacaacaaaatcatcctcagttttctatgaatatacacccaacacaacaacaaccacacccacaacaatttcaacaaaactatatgacacaaccacatccacaacaaatgcaatatccaccaattccacagcaacaacagcaacaattttagtggtttgagagataaatttaaattgggtttgaaattcaaacaaaaattaaaatacaatataaaaaaaatataaatatgaataaagaaagcatttttattaggaatgtcatgatattgcattttttttatctattagattctgttgttatcttgaacaaataatgatcatacatatatatatatatactttatttcattttactttattttttatgtatgtatgtatatatacatatatagatcatatgcagaaagtaatggattattttttttatgcattaaaaaaaatcaccagtaaagtttttttttctattttaattaacttgggagaattaggaagatattatagttatttaaagtaggggaaatctcgtcagagttatgaagatttcggttgatataattgagaagatcttagtatcttcttttcaaagtagtaatacaactttagactccaatactaaagaagacttgttattaaaattacaagaatatttagataagtttacagatgaaattgtattaagatctattgaaaataaaccaaagagtgagatagataatgacgaaatagttcttaatgaaagagatatagagagaataattggtcttttgctgttggatatgtgagaaaaagcaaaaagcaaaaaaaaaaaacacacatatcttgaatagcaaacggattagctggttttattatgaaatttaattccatcatttgattcagtgatttttgttcttttggagaatgaattagatttgcggtgatacagagtttatattatgaaatgctaatattagtggatatggtacacaaatgttgcagaaaaaattataacgtaataatataggtatgtaatttatattgtcttatatatactaggatatggaaaatgctatacacaattaattgataagtttgtttctttgattagatttactgtgtttcaaccgttaattttacaaatcaagtaaagtagtactgttattgttgtttgtggtattgttagttgaattaccaaatccatatccagtttgggaaggaacaatgtttgtacttggtaagcctgtatactgtgttccaataaagaatggattggcaagatctttttctgtgacttgtctataaccagtaccttgtgaatttataaatgtacctgtttgtgtgtgttgagcagggatacgttgattaccggtattaccaaatgtatcgacaccagcaccggtagctaataggctatttagagcactatatttgtcagtgatggatttattacctgttctagtctgttgtaatggtggttgaacagtagtatttgctgtagatgctgatgaagtttgtaatgatgttattgatgaaggtggtcgagattcagagggtgtactagatgttgaaatggtacttgtttgttgctgttgtttgtttctggcaaatggattattcgagccagtgggtaaggtttcctgttgaatgccatataattgttgttgttgttgtgctaataacgcagcctgttgttgttgttgcaaagcccaatattgttgttgttgtagagcggcttgttgctgttgggccaaaagagcttgttgttgttgaaattgtagatattcttctggggtaattggattaccaaatatatcgtaatatatttgaggttgctgtgcttgttgcatctgttgctgttgttgacgttgtaattcttgtaatctttttagatcctgttcttctttacttagttgtagagccattctcctttccccttccacttcacgttcatttcttttacgcctagcctcttcttcctctgcagtaattttactttcctcaatagctcttcttaaatcttcatcttcctcatcagccaaataacttcttgagctatttctatctccatctctatctcttctcccccattcttttcttcttttcccattcaattctctctcttgttttaatctttcatcatccaacaataaagaagtcaaggctttagccttgcttctgatcattttcccctcatcagcaccactctcatcggtatgcataaattctcttagagtctttataatatagatattttctttacaccaaagcacacagttctcgctaccaaacctaaccaagaagtccagtaccactaacgacttgagtacatgtctccaatatttccctttatcgttgattcttttgtccaacatgtccataatctcgaagaaatcggtactattatacgacttatcggcaagttcttccaggaggaacctgtctggcacattggagttgtttgctgttgcatcacgcactagtacctctgtggaggagtagcccttgacaatatttttggcagaacgtaacatttcttttttttctttttctttttctttttctttgcttccttttttcctggcagaaatatttagttgttggaataatgttttaaagaaagtagaaactgactgaattcaaatgttgaattagaataaaagatcaggtgatattattattgttgttgttatagttattccagtttcatccatatgcttaaaaaagcacaaaatgcaaaacaaaaataaagaagttatctatatttgtttcctttcttctttcttctttcttctttcttctttcctctctcttctctcttctctcttctctcctttatctctgtttgattttttcttttacctctaactatccatacgttgttccatcttttttccttttgcgtcggtttctactacgtttgacctttagagggcttttttttttccctttttccctccttaccaatacaaataaaaaagacaaataagaaaaaaataaaaaaaaaacaaaaggaacaacgattgtgtgaagtatggatgtatgggtttacgtctttttttatttgtttttttttcttttttcacattttctattcgtaagaaaaataaaataaaataaaaaaaaaagagttaaatttcgatatgcagactttattgtttctctgtgtcacataaaagagagatgcaatgtagtgaacattgaggtgtctgttctttttttttttctgtcgacaaaaagtagttggtacaaagataatatatcatacttacatactaattagttatgtaggttcgataagctggaaagaagggactaaggaagagggctgtctctctctttttaaacgaagtcattttcttgtgattactaatgagtaacttatctttttttttccttcgtttcatggagttggtgattacgtaataaaagcgtttggaaactgtccgttcgagtttcgtgtgggttctttttttttttattttagttcgtttcttctaaaagtgatatcaagaaaatattcagaaagtgtggctgggaaaagtggtaaaggcgatgaggaaaaggagtagcataggaagctgaacttagatggataagtagtactgggtttgtatatatatatatatatacaattactatcatttttgactcgtttcgcttttctatcttattttttttgcaagaaatctcaaacgcgaaccgtgtaccctagccaactagactaattcactattttttctttttttaaaatgtcttctactcaaggtaagccaattcaatgtactgctgccgttgcttatgctccaggtaagcctttatctgtggaacaaattattgttgatccaccaaaggcccatgaggttcgtattaagatcactaatactgccatctgccataccgatgcttatactttgtccggttccgacccagaaggtgcattcccatgtatcttaggtcatgaaggtgcaggtattgtggaatctgttggacctgacgtcgatactgttaaagtaggtgatcatgttattgctttatacactgctgaatgtgctaaatgtaaattctgtaaatctggtaaaactaatctctgtggttccgttagagctacccaaggcaaaggtgtcatgcctgatggtaccactaggttccacaacttaaaaggtgaacctttacttcattttatgggttgttccactttctctgaatacactgtggtggctgacgtctctgtggtcgccatcgacccaacagctccattagataaagtttgtcttctaggttgtggtgtcaccactgggtatggggccgctattaaaactgctaacgttcaaaagggtgacaccgtggccgtctttggcgctggcactgtaggtttatccgtggttcaaggtgctaaagctagagaagcttctagaatcatcgttgtcgatatcaacgacgacaagaaaaaatggagttttgattttggtgccaccgattttgttaatccattaaaggacttggaagaaggtgagacaatagtatccaaattggtcgaaatgaccgacggtggtcttgatttcaccttcgattgtaccggtaacgttaaagtcatgagagacgcattagaggcctgtcataaaggctggggtcaatccatcattatcggggtcgctgccgctggtcaagagatatcgacaagaccattccaattggtcactggtagagtatggaagggcagtgcttttggaggtgttaagggtagatctgaaatgggcggtttgattaaagattaccaacaaggtaagttgaaggtcgatgaatttgttacccatgttagaccatttaatgaaattaatcaaggttttgaagacttacatcatggtgattgtttaagaaccgtattaaatttttagacaaattagaagagcaaaagacaaaaagaattataaagtataggtttctctttaacaaataatatttaatatatgtatatattatataagatttttttttttgttcttttcacaacaatattgcaccttgattggaaatttagtatccctacagtttgtatattctaatgatcctctaatgttcccatcttattattagtgtccattctagtcgtattaatttccaaattgaaattaatagagttattgttgcttttttcattacttttattttgatttgttttattaattgaagattttgagtatgttgttgtttttttaggctcaccacatcttaaacaagtaatattcttggcaaaattatgataatcacatacaacacatttccaatctccagcacggaatggtatattactgtgtgtattgtggttaccataagaaggtgtatttatatatgctatttttggattataattggtagtgatggtagtagcagttatgagggtggtggttgcagaatttctatcatctgtgttgttggtaaaattgtcattggacatacgtggattttgtgaaagagataaatttgtgtccttatcatatgtagtcattaaattatggttataataattcgaatttgaactaggtgatccatgcttgtttgtggtgtcatcggtattgttgttgttgtggtttttgttgttgttgatatgatttcgtataaaagtttcagatttcatcttttgtaatgcacttggaatcggtaataagcatctgaaacatgcaatccttctttgaaaatttaaaaatccacaagatggacagttccagtcgcctggtcttggtttatttttgctctgtggaaacgatattaaaatttccttcgctagatcaataactttattagaagatggttgtaattcaatgatatgttctactaccttaggttgttttgtattggcaacattagatagaattgatctaccgttcaataagtttaaggcatcttttgcattttcgtggttctgaaatataacaaatccaggtatactgtttaactcttcaacgtatgagaattggttatattgccaaatagatggatcttcgttattattgttgttattacagttattaaagttaaatagagtttctacaatgtttttaaaagtccaaaatcctatcggtcttgtattatgttgggtaaaccatgattctagttcactttgtgtaatgtctacagggagatttgtcatataaagaatattggattcttcttcttgaaatgttttgaaatctaattctaaattgtatagatggctcaaaatatcatataattcagtctcattgttattctgtttagaatataatttcgaaagaacagttattgtcgtgtcaatatttttcaagggttgtaaggaaatcctagattgatcatcagtagcataattcccttcctttttgattgtcttagttttttgtccttgacacagttcagtaagacctaatagtgttaaacaaccagttagtctaagatcatttagatctcctcttgactcaaacagatcttgtatatcatttctattaatagtttctggagcaatcacatcattgttataaatattattataccaaacaccatatgctttccaaagatcacatatccttaaatgttttaagaaatttggtaaattgacattttcgtcgaaagcctgtctttgtaaaacaactttaagagtccatgtggaaaacatagaacagataataaattcggaattgtttaaggtctcaattattatttgatgcaatttatcaacagcaatttgtaatccattggatatatcataatttacaggaatagacttagattgatttagtagttctctcagtaacagtgatgattctgattctgaagattcactaattgtctgtaacgtctttgtatctataaatatataacagaaatttgtaatatttgtttgatcttttggctcctctggtagatatttagtggacgtttctagtaccacataatacattatataatatcaccttctatttctttttctgaataagtagttatattattttggttatttaccccttcctcctctaatcctaaagaaaatgtttcagttgtgtacaggtgttaattaaatgccttatataagactgtttgtattagtctgactaatgggaaggattttttttatgcaatattaaaatttagagatgagcaaaacttggaggaatataaaattagaaatgatcgagaaaaaattaaccaaaacttgtaatatacatagaaaaacatatatataagtaaaatcaaataagctatagtgattagtgtaaatttttaaaggaaataacgtattactaataatagggaaggagaattaactattggttgttgattttgattagttaactcctttaagaagtctgtggaagatagttaaaatatcaaatcaaatgtttattcctaatatatatatgtgtgtgtgtatgtggatatatagattcataatttatgtataaatgaataaggaagtgtatatgcctaaaagcacatttattactttgatcttttatcgtcttcctcttcctcttcatttgattcattgctttcttcctcttcacttgattcattgctttcttcctcttcacttgatttttcactttcctctttttcttcattctcttcttctcctgaggttttcttttttaattccttatttaataaatattctggcaactcattggtaacaccatctttatgttgttctaaccataatttctcccattcaacaatacgctcaatattactttccatttcttccactgtattactttgtagttcaaccacaatttcttgttcataagattcaattgcatcttggagtacaacacccataatttcagcgtctaaattttcttggatcttgctttcatggtattttctagcatgtaacctgtcaaataatattgaattgtcacatctaagaacaacaactaaatcgatcaatctctctggaaagacatcattaacgtgccaatctataatactcttcccttcatgcaacaaaggttccaattcatccaatagcttatcttcatcgactatgtgcgatttacgatctttatcataaccttcgtaacatttgtgtttttctgcaaaatctgatatgttataatatttgtaatctggtaatctgcgttgtaataattcacatgtagtggattttccacaacctggtgtacctgtaattaacaaatttggttgatatctacgagattccttttgacccataataattgatgtgtaattgtattaatccttctttctctatttatttttcctttcctttaaatgaaaaagtgtactatataattctttttcacagttttaagtctacaatagtctattcattgtagatggtaatatgaaacttctatacacacaagaatgcattctttattacatatacaaacagctatcatcatttttgaatgttatgctcatcgcaagttttctcagtaaatatttccttctaattttttttttttttaattcgaactcatctttacatggcaaaaattaaagaacaaaacatcaaaagaaaaaatctaagacctaaaaataaaaggtcaggacttgctctataatttcatacagaaaatattattgcatctgatatatctgttagaagagctgtgtaaactaaaattctgatacatatattcaagtatttattgttttttagttcgcttttaaactaaaaattgcaagtaggaagggatttttaattgccccaatcaaatataaaatcgaaataaaaaacacattaaagtgagaagatacaatggacaaattcggtttacaagcattattaccattaattaaacaagatgatccagaactagccaagaaatatgatcattcaatgactcttggagctgatttagcttccatgttacattctttaggtatatctaaggatttaagacgacaaagagtgttagagacatttcaatccccatgggctgagacttctagaagtgaagtagaaccacaattttatatacctgagtcattcactaatatacctgaagtacttcaatcggagtgtacgccaccatgtattaattcaatacaaagagatcaacaaaaagtagcgctatttcaagatgagacacttttttatttattttataaacatcctggtactgtggttcaagaactaacatatttggagttaagaaaaagaaattggagatatcataagactttgaaagcctggttgactaaagatccaatgatggagccaatagtttctcaggatggattaagtgaaagaggttcctatgtattttttgacccacaaagatgggaaaaatgtcaaagagattttcttctattctataatgctatcatgtaataaagatatatatacttatataaaaggcaaatctcattgtttctatctattattagcaggagtaggaaaaactgagtttaggcataaagataagatttcaagtatatatattgtaattaccattagtgatatatatatgtaattgtatatacatgtgttggagtaggcttaaattaataaactagatctagtcaagaaaaaaaaatatacagatattggatatagttggtctttaattatgtgttgaaaatgttcattcagtactagtgaagacaacagtaaactaaaagtaaaataaagtaaaataaaccaaaatcgcaaaaataaaaagatatcaagctctttgaacacggtatctctttcctctaaaaccagtaatatacatattaaattgatagatttcttgtggattgtaatcatttagctcccacttggtactgccaaatacattcttgacaggttctaataagacatctaattctctatcatatttatcttttagtaatgctacatcattcattatatcattttcattgaaaccagtatgaaaaattgcacatttggtatctagaagacctttcatagtatcattcatccataaatttgtagtatcactataggcaaatcctgggtggaaaatgaaaaaaacatcattgtatgggtcatatgggtaaaaatcttgggctagatgtaattcatgaaaatattgtgggtgatatattaatgataatgtatcatcaatcttcttcactaatggactggtagaatcagtttgtctagtttcatttaattggcattcagggcctataaaatgaatttcaaaatcttgtgcagggaacaaaaactgtagttgcttccaaacatgaccaggtagttgactttcagctctggcgccaacaatgaagattctcattgggttgttagttggtaatgtatttttagtttttgatggatatagagtgtatcttaaagcagcaatggacttcaaaccttctaaagttagtggacctctcttattataagagtatggagaatattcatgtaatatagatgcaattgtgatgggataacttaacatttttgtgactgtagccaattcaaattcggtatccatcgaataaaattgtcttgtataaaagaataaatcccaattttgtaaactgaccgctctatcaaatccttgttctaatggaaaatcaaattctgggaaggctctaccacttcttagatcatgttcataaatgttaactttctttaatttttcatagattttattttgatggtaattcttatccatttcccacgcttccctggaatgatgagttggaatacctgatattggacatgtatatctaatatccttctcagtaactggacaacgtgctaattttttaatcctcatagctcttgcgcgcaaatcagggcagggcgattcttcccaaggatgaaatctgtttgattcttgtggagcgtctggggatgggggtggctctaaccccagagcatttctaacaaatccaacaatatttcttgactgaataacatttggtaagttgaagcttctatagtaaaatcgttcaacatgtattgattttgaagcaaacatatggataaaaataataataaatgtatagcaatcaatttactatagtaaataataagtgtctaatttgtataataaattatcaaagaatgagatactattatgtgctttatgtgttcattgacagtgaattcgactttttagtttgaatgttgttctataactttcctccccttctccccttgtattttacattgttaatcaattcagtccgcctgtattctttcttttttttttttatttcattaatagcattttcactgtgctgtaaaaggcgtaaaagaaaaaaacaaaaatgaaattaaagtgaaaaaaaaaatggatatgaatcgtaaatgtttagcgtattataagcctgatacaaagttccataatcatagagagagaaatggagctgtcataaatgtcaaatctgtgtctttataagtaagtaaatgtctaattatatattttatacagtttgttaatgacaaatatgatgatgttaggtctgtaaactggcttgattttcatataattctataatttgatctgatgaagtggcatcttccacgcttttgtcctccctgatccgaataaatcttggaaatcttaaagaaattcctttatcatatgtagaactacctgccttataaataggggataacgacaaatctgctgttagaacttcgaatagtaatgtaggttcaaaccaaacatctggttcagcaccagagtcataaacatatgtggcttttggtccatcaataacagtgtccttcagcttattataaagatcggctaataattcatctgagaaaccagtaccaattttacatgcagtttcaaattcacctgtgtcttgattatagcaacccaataggaaaccaccgtatgtaccagttctcttcccacgtccaaaaaatccacctaatacacataaatccagtgagtctcccacacctgctaaataatctttcttcaactttaaccaatttctcgatcttttacttggttcatagaacgattcttctccatccaacatcttgaccattaaaccttcgcatgaatccttaactgattggtctagaaaatgttgtaattcttctagattagatgttgtcatttcagtggcatattggaattcaccagggacaggctttgttgctttatgtaaaatttcacgtctctctcttaatgacttgttgatcaatctatcatcattatgggatagaatatcaaacgcaaataaacagactcgaactttaatgtcactaatattaacatcctttctttttcttgttgataatacttggaaaggtaaaattttcccttgttctttatcccatgcaactgcttcacaatctaaaattaaggatttggtggtgtttggatccttaataaaatctttgatagagatctctgggtaccgctctgtcatattttcaccatttctagagtatattctcattgaatcatcttctaatagatgaacttgagccctttcaccatcatatttgtattcggatgtaaatgtttgtccttgaaaacggtctaggacttcagatatcgcttttgttggtcttgctaacattggttttagtggaatcccaggccttaaagtacatactttttctaggttcattataccatgctcaagacatgcattgattacaatttcataattaggaacttggcaaaatgcatctctaatcttttgttctgcgttttctaatagattcatatctgggtcaataccttcatcatattctttgatcaataatgctttagctaatgaaattaaaacagttttttcagcaagcccaattcttaatttagattcaagtgatctgactaaaaattttgcctcaacaccttgacaagcagtcaacattcttttaatcaatttaatttttctagtttgggaatcttttccctgactctttgcaatcaatttcaaattagtaaagacttctccaatggttaatggtttaggtttgaacatggttggttgaacatttcttgcttctaatgcaatttgacctaaatcaccgatggaatgatattttgatttaacttgtttcaaagatttaccacaggattcagctatagttttcattagtaacccttcaccaagtcctagttctaaaccttgttcataatcaggacctaatttgttgatacacaaatatgtaatcgtgattaagttttgtggatcttttttcatcgcttcaataagaaaatctgaacatagtttaatgatggctagtctcgaagatatagattcgatctcttggaataaattacacagatctgaataaggtatatcggatacaaaattttctttattcttattatcgggattatcactgttaatagacgtattaagggatgtggttgattcagttttacttttttttaaactgtttgatatttgagcatcttttccgttaatattattactgccatcattgttagaattgtcattatttttgttcattgaagtaaatgatcttttcaatattggagatgaagtagaggaagaaattccaggacttgtttttttaacatgagatatgacttggttttcttttacagtgtttttatcatctgtatctatggaatcaggtattttgtcttcgtcatcatccttattattcttattattcttattattagtattaatttttctatcagaaattgtattatcatctttgttcttcattgaagagaaaaatctcgctaaagtagcttgtttcttatcacctgaactcattttacgattatatgtataggataaataattttgctgatttgaataataaaacaatctaattaaatacttactgagagtggttttgaatgttgaaaggttgatagaataaggaaagaatcttggttgcgatagatatataatgtttgtagtgattggatatattttattaaattttagcatctacggatataacatatcctacaaaagaaaaaatctggtagttgatattttcaaagaatattatccgttgttgagtataacaggaatatgagaattcctagtatatagagcagacaatgaagaaagactatataaataaatatttgatatatttttgaaacatcgtatagtctactataactttcaaaaagtttttttttcgtctcgactgtcaaatataaaatatataggcagaattttcaaaatgattaagataattctgcaacaaaaaaaaaacagaaagataatttagtaagaaaacgctgaaaagagatattaaagttggccagcactggcactattcgttttgtcttccttacttactcacttactccttttcacacacacagtctctctttctatacacatatatatatattattaatcttcatgcaactggtaacaaatgggacagaaagctgttaacaactaagaagatgaaggttaaattaagagaataataaaaaacaaaatcggattttttttaacagattaagatgtgggagaaattatataactaaggtcagtaaaagtgaattttgaagattttatatatgtgtatgcttatgtgtgtttatagatctgggaaaaaggagtaaagcgtattaaaaagggcactaactccatcaaacgtaagagactaactaagatattctaatattgatattctcaacttgtaaatatatagatgttaaccaaatgttcaagctaaagtataagtaatataagtaggtaacagttttaaactcaaatttattactactgaatatgttagaagccaaaaaaaaaaaagggggggggagaagaatcaaaaaaatataaatttaatactgcaaaaaaaattatgtttaaataaagggtgtctaaataatttacatgtatatataaatagatatagatgtttatatatagaagaaaagagaaggggggggaaacaaacgataaatcttgtattagataaaaagttttcttgatattgatttgtaatagtgtagtgttcattttttttttcacgttatattttgatattggactcttattcttatcacctagaaaagcaaaaaattataaactatttgtaagtgaaggtagaaatcatctcttaaatatatatatatatatttatgaagctatggcaaggttaaattcatatgaagaaaatcgaactcttttatctgaagctatgatggaaaatgaaatatcaatagtatattcaactacacataacgaaataattaaagaagagacccaagtagacttatctaaagaagagatgtttgaacattgttaccattattatattgcgttatctcaatcacaaggatttcaatggaatcaggatttatttgttactcagtaccagcagaatcatcaagtggaatatgatggacatgaagattcacttagtgaagatatagagactttggaatcaagaagtatttcagatttgtctcgaagaatacagtacagaagaagatccaacagtaatagtataagttttaaaagagattcaaagaatgggttaattaatttgtcgttacctttgaatgaatatttagaacaaagtaaagacaactgtgatgaattcagtcaaagtgaaaagggtttaataaccaaaaaggaatttaaaaaacatctagattattacaagtggctcctaagttgagattaaaagtgtatgaggtctaacttatcatattgattgaaaaaaaaaaaaaaaaaaaaaaaaaaaaaacattgtagaagttcaaaattagtaaaaaaatattaaaaataaaagtaaacaaaaaacaaacaaaaaatgaagaatattacgtattccaaaataggaaaaactactgataagatatacagaaaacataaatgtaaatattgagataagatagttaatttcataagataaagagaaagataatattcttttaataatgctaacactaatcaacgtaacaataatgaaagataaaaacattgttgtttacatattttctaatagattaacaataaaaatataaaaacatataatagctgaacatgtaatttatcgtgattatttaaacaaacttgctatttagacccttcttgtaaaatatttaacaagcatacataattgtactcacttcgatgtgtatttaatgaagggtgttattttcaaaatcaggttatgatatactattgaaacaccgactcttttcaacagcatgccaaaatcagttaataacattaacaatacagactattaaaaaatgtaattgatatttctaatatattgagtctaactaacaaaacaagaagtaatatgaaataaacagttacacgttacttacatgaatgatgagacattaaagtatttaagcttttttttcaagagctggatgcatatttttacctaactatcagatggttataaaaaaagaacgatactatattaacaagaataatatgatttgtggcattcagtaacacttattacccgcccgttttaccagtaataacaactgtcgtagatttaacattagaaaaaatagcaataatctaatcagactgtctttctctaacataaataaaaaagattatcctcgtaaaactgtcagaataagtcgtaattattgcactcttacattaatgctgcctttaaagctatctgtgtgttgtagagcacaccaaatctttcaatacaaaatatttcagacagtaaaattcaatttttttttttttgaaatgagagcagaatgaaaacaaaagaaagaaaaataaagaaaatggaaaaaaaattgcaaatataaaacaaaagaaaaaaaaaactatcccggaatggataataaaaaaatattgaccaatcaaaaacaagaatgcttatcggatcacgtgccactattgttccatgtgtcaattttattggctttcttatctcaacttttatctccatctaatcatatcagtctttataatctttaatttcaatatttgataaagacaaggaacaattttcaaggccaattagttgttccccgaaaatcacctttttctataatcagctaacgacattcatcactgtctgactattaattcttattctctaaatgattcttaaaattggacaaatattcctttgtcatcaataattttattcctttggaagtcattactcttctgctaataattcctggtctagctttaaagtgaatttgtcattattatagctggctcatcacaacatattccaaacattttaaagttcacaattcaaccaagctaataaaatagatatggtacccttttccgatcggaacatctaggaaattaccctatagagaaatatttaaaatcttatttcttatccacacatttaaaggctcagtattatttttctttttttctttttttctttttttctttttttctttttttcttttgaatctttttaattatttcaaacaaagcagagtcatctctcaaacaataatctctttattgttttaagaacaaatggacaatattttatattttcctgttctttttttctttttttcctttttcaattttatctacaaaaaaaaaatttactccacttacaaaaataaaaaaatgcactgcaaatttttgaacgattcaagatttctctttcaaaaggaaattctttttcctttcagtcgatgctcctctcatttatttttttttttcacattttctattatcttaaaaaattcttcctgtatctttgtttacttttaaaccggaatattaacactgttactactattatttttttttacgtattttccaatatgaatcttttagatatttcctggtttctttaagttgtttttaatatttccgaagtatatataagaacttttatgttccaatcttgttttagtgagacgaacctagatcttttcattaaagttctcattcccgttgcctcattgaccgatcctttgccagtcgtagctagctgttttttcccccttttacagcaggctctttatttatttacttgtaacttattccctgctactatacttctctccctcaaggccaagtaaaaagaagaaccagaattaggaacaaccgcgcatctatctttctcattcacccgtatctttagttggagatactgatacactttaaacaaccatagggataaacagacctatccatattctttatttatttattactctatttatttatttatttatttattaattttttctgatagaaacgacatactcataatttttattcatacatttgttattttctctttatttattttgattttttttcctttataaaatattacttcaaaaattccaatcacaacaatgaaacaaccaagtcaacctattggtctttataatcctgattatgaacgtgatgcatgtggtgttggtttcattgtcactaaggcaagcaatccaacccataatattttaaatgatgctaaacaaattttggtaaatatgactcaccgtggtgcgtctcataatggtatcggtgatggtgcaggtatattattgtctcttccacatgacttcatcaaacgtgaattccagttgcctaatttagaacaaggatcttatgccattggtaacgtctttttccatgatttattgtactttaacccagatctttgggatagattggctgctgaacaaaatttgaagattttacaatggcgtgatgttcctgttgattcatcgatattaaatccaatctgcttaccaactgctcctataaaagttttgcagcctttatttgtctccactacaccacacaagtctgaatctgacttaagacaaagattatacatatttagaaaaaaattagaaaaaatctttaatcatgataacagtaaagtctatatatgttctttatctgacaaagttatggtttataaaggtcaattgactccagcacaagttttccaatactataagtatgatttggaagatcctgatttcaagattttcatgggtttggtccattcgagattctccactaatactttcccatcatgggatagagcacaacctttgagatggatcgctcataacggtgaaattaacacattgcgtggtaacatcaattgggtcaaagcaagagaaggttccatgaaaacaaagaatctaggtgatttgaatgaactgttcccaattatccctgataaagggtctgattctgcatctcttgacaatgtcttggagctgttagtcactgaaggagttttatctttacctgaagcaattatgatgatggtcccagaggctcataaagatgatatgaacaaagacttgaaatcatggtatgactgggctgcctgtttaatggaaccatgggatggtccagctttgttaaatttcactgatggccgatacattggtgctagagttgatagaaatggtttaagaccatgtagatattatgttacttctgatgatagaatcatatgtgcctccgaagtcggtgtggttcaagatattgatgataaattagttatttccaagggtaaattgaaaccaggtgatttattacttgtggacgctgaaaattgtactattataaatcaagacacaattactcataaaattgccacacgtgaaaatttctcccagtggttggaaaataaaacaatctctttagaacaattaattaaagatattccaattgaaactaatataccggctaactgtgtccttgataatgagcgccttttagctaatgggttcaccttcgaattgattgggttattattagctccaatggctttaactggtaaagaagctttgggttctatgggtaatgatgctccattggcctgcttaaatgaagcacctgtcatgttgtttgattacttcaaacaattatttgcccaagtcaccaatccaccaatcgatccaattcgtgaggccaacgttatgtctttggaatgttttgttggtcctcaaggtaacctactagaaatgaatgaaaaccaatgtgaaagattgaaattggaaacaccaatcttaaccaaacaacaattcaatgcgattgccaatattgaaaaagttcatccatcttggactgttggtactattgatataacttttgacaaatcagaaggtttatcaggttacaaagctactattgaaaggatcatcgaagaagccaacaatttaattgtcaaatacaacaagcaaatcattattatttctgatagaaatgttaacaaggatagagttgccattgcttccttaattgctgtttcttctattcacaaccatttaattagaaaacaaaatcgtgcagaagtcgctttagtcttagaaactagcgaagctaaagaagttcatgatttctgtttgttgctaggttatgggtgtgatgccatctacccatctttagctatggaaaccttagttattttgaaccaacagggtttgttacgtgacactgttaaaaatgaagaccaaggtttagttgctgatgacaagatcatttctaactatatatatgctattgaccacggtattatgaaagttatgtcgaagatgggtatttctacattagcctcttataaaggtgctcaaatctttgaagctttaggtttagatgacgaagttgttgacttatgtttcactaacactgcttccagaataaaaggtgctacttttgaaattttagctcaagatgcctttactttacatgaacgtggtttcccagccgaagataatattttaccatctaagccagttactgtcctttatagtggtgagtaccactggagacatggtggtatgaagcatgtcaatgatccatctgctattgctaacttacaagattctgtcagaaacaataataatgaagcttggactaaatatgttgagaaggagatggctgtaattagagaatgtactttgagaggtttacttgaatttgattatgaaaactctactgaaatcccattagatgaagttgaaccatggaccgtcattgctaaaaggtttaccacaggtgctatgtcttatggttctatttctgcagaagcacacactacattagccatcgcgatgaatcgtattggggctagatcgaattgtggtgaaggtggtgaagatgctgaaagatctgaaatattaccaaatggtgatacaatgagatcagctattaaacaagttgcttccggtagatttggtgttacttcgtactacttatctgatgctgatcaattgcaaattaaggttgctcaaggtgctaagccaggtgaaggtggtgagttaccagcacacaaggtttccaaagaaattgccaagactaggcactccactccaaatgttggtctaatttctcccccaccacatcacgatatttattctattgaagatttgaaacagttaatttacgatctgaagtgtgctaacccagtggcggaagtttctgttaaattagtctctgaagtaggtgttggtattattgcttctggtgttgctaaggctaaggccgatcatatcaccatttctggtcatgatggtggtactggtgcagctagatggacttctatcaaacacgcaggtttaccatgggaattaggtttggctgaagcccaacaaactttagtacttaacgatttaagagacagagttgttttacaaactgatggtcaattacgtacaggttttgatattgcagttgctgtattacttggtgcagaatcgttcactttggctactatcccattgattgttatgggttgtgtcatgttaagaagatgtcacactaacacttgtgctgttggtattgccacacaggatccatacttgagatctaagttcaagggtcaaccagaacatgttattaactttttttacaacttaattgaagacttcagaaagattatggctaaacttggtttccgtactgtggaagaaatggttggtcatacagaaaagttaagaaccagatcagatttaaatgcaaaaacatctcatatcgatttagctgctttgttgaaaccatctgcatccattagaccaggtgcctctattttcaacactaaaaagaacgatgttaaatttgaaggccgtattgacaatatgttgattgaaaagtctgaagccactttggctaacaagaccccaacttctattgaagacatcaagatcattaatactgatctggctgttggtcctactttaggttacacagtttccaaaaagttcggtgaacttggtttaccacaagataccatcactgttaaattccatggtcatgctggtcaatctttcggtgctttcctaccttctggtattacattcaaattagaaggtgacgctaacgattatgttggtaaaggtttgtctggcggccgtatcattatcaaaccagaagaaggatctaaattagttagtgaagaaaatgttatagttggtaatacctgtttctatggtgctacttctggtactgcctttatttccggttctgctggtgaaagatttgctgtccgtaactctggtgctgaaattgttatcgaatctgttgttggtggtaacgcttttgaatatatgactggtggtagggctattgttttaactgaaatgcattctgttaacgccttttctggtgctactggtggtattatatattgctattctgaaaacaaagacaatttcaagagtgttatcaatatggatactatcgaattagagactgttgaagaagaagatgtttcttacatcaaaaagatggtccaagaacattttgaattaactggttccaagagagctgaaaccattctttctaatttcaatgttaatgttgctaagtttgtcaaggtcattccaagtgattataagaaggctttagccatcgcacaagaagaagccgcttctgccaagaaggaagttcaagaagctaatggtgtctccacttcccacaaatcaactgtggatgaaccaaaattacaagatcttgaagattacattccagaaaagaaacccaccaaaaaggtggccaacttcattaaatacaaacgtaagttacctcaaaacaccattccaccttcagaaagattaaagcactggcgtgaattccaaaatgggttatctgccaaggacattaagatccaagcttctcgttgtatggactgtggtactccattctgtcaatctgatttgaattacggttgtccagtatccaacatgataccacaatttaataactttgttgctagaaatgaatgggaattagctttgaagactttgctatcaaccaacaacttcccggaattcactggtagagtatgtcctgccccatgtgaggggtcttgtaccttgggtatttccgatgatccagttggtattaagtcaattgaaaggcaaattattgaggttggttataagaatggttggatgaaagcaaacccaccaaaggtcagaactgataagaaaattgctattattggttctggtccagcaggtttagcctgtgctgatcaattgaacaaggtaggccataatgttactatctttgaaagaaatgatagatttggtggtttgttgatgtatggtattccgaacatgaaattagacaaggatattgtcgagagaagattaaccttattaaaagaagaaggtattaaatttgttaataacactgaagttggtaaggatatcttattaaaagatttgaagaaagaatatgatgctgttgttttcgctgttggctccactatcccaagagatttgtccatcaaaggtcgtgaattaaagaacattgaattcgctatgagtttactagaacaaaacacaaaggcattattatctaataaattggaaactgtccgtaaacaaattgatggcaagaaggttattgttattggtggtggtgataccggtaatgactgtttagccactgccactcgtcatggcgccaaatctgttgttaacttagaattgttgccacaacctgttccaaagagaaatggtgaaaataatccatggccacaatggccagtgatcatgagagtggattatggtcacgaagaagtcaaagaacgttatggtaatgacccacgtgaatacagtatcatgtccaaagagtttgttggtgatgaagcaggtaatgttactggtatcaaaactataagattagaatggaaccgcaatgctgaaactaaacgttgggaaatgaaggaaattccaggcaccgaagaagttctagaagcagatttgattttattatctatgggtttcactggtccagaaatgattaagaataaatcgattgaagttaaccaaaggggtaacatcaagactacatcttctgactcctacagatataaggaggacgacaagatctttgttgctggtgattgtagaaggggtcaatctttgattgtttgggctatccaagaaggtagaagatgtgctagagctattgatgaattcttagacaagaagagctatttaccagatcttggtggatttactccacgtacatttgatttactagaagaagaagttactgctactgcttagtataggttgaatcaaattttaattgggcaaaaagtcgcttctattttgtaatatttattttactgtatattatttatttttttacatatgcttgttctctttattaatttaatgatagtatgatatctcttattaatatggccttttacttttctgatttgtttttttaataattctaataatctcatgataaaatcatatatcagaaaaatataaatgaaatatagaaagaaagctactatcacaacaactactattactattattacaaatatatatatatatatatatatgtaaatataatttatgcaaatatgttcattatatatgataagaaaccttttttttccttgttttgggatggaatattattattactgttatttttatcttttgataaggatgatgacggtgatgagaatgatgatttctttttatttgaattcgatacggagacattgggattatgattactatttgtgtttatcggagacacaatatttcctgctccacctctaccaatgacaattgggggtggtgatttattacctccgtgactacttttcctccgacttttcttcaatgtgatagtctttggcgaaccatcttttgaatgagagatggttttaaccaaccgaagtttagtaccattaccactgcgataatgatgttgttttggatcagtgttcataaatttaaccttctcctgttggttaatcgtatctttatttgaagatgtcacaggactaatatgcgatctaatcttgcttaacacgttggtaactttagatatgttattattattattattatcttcgaataaatcctcattggtgattggtgcaatatagtcttcttcatctataatgatagcgtcctcctcctcctcattactgtttctcgtatgggtacgagtaatctgatacaaaaattgactatgacgactattcaacggttccattgtattattttccaaagaagcaataaagggttcattagctacatccaaatcagttatggtattttcaatagtatccatataactaacgtcaggattcttgctactaagatctttatccctatctttatctttatccgtatgcttattgagtttcttattgttattatttttattattattattattattaagatgatgatgatgatggtggggtaccggtacatctcccacatcctgtgcttttctggttatagtgggatcaatatttttcctcatattgcctgctccacccctacctgtcgaataaactggagataaaatgtttggcgtctgtgaaccttcaggaatgatttttggtgatgaaatcttttcatttgagaaatgcatattacctgcacctcctctacccgttgacactctataaccttgtgacattttcaatattttttactttctttagtctagtgtcttttcttttctcttctttttcgtttttttttattctttgatcgtctgtacgagtgaaagtgcaataatagtgttagatatgaaaattaatagtcagtaattaataattaataattaataatggatatgaatattagatatggatatattcactgttaaattatatatacagttacagatataaaataaacaatagtgattcacaggatatcacaggatatgatatcaattagaaaacgataaaggagaaatgaacgagaagcgagttagaaatagagaaataaagaaagaaaaaaagcgataataagtgacgatggatagaacatgcgaggaattactacaagaaacagaaaataagaatgtactcaagattaagaataagattaggattgaggcaagaaataaagcgaaattggtaaacattcacgtcacaatgagggggagaaagaagatgtctggaatcaaatctctccaaaaacttaaaataaaggaaaaaaaaaaaaagaaaaagaaaaagattcctacaaatgcaaaaccagtgtcatttatttgtttattttttttataatccatggaaattggaatttccaaacacacaaactgccgttctcgaagaaacaaatcgcttcgatttttctttctttttatttgttttttttttttttctaacttaaatgaaaagaaagaaggagggggaaacacggtgtgatgtatggatgtacatagaatcccacgtttttattcgtctttgtcgaattgtagaaagacaatttcaattgaagagaggaaatggaaaaaaaaaaagaaccaaaaaaaaaaaacaaactttttttttaaaaatcctcttcatctcttgaaattttgttggggcgatatcggaaataaaatacaaacacaaatagtttctgctttcctcctcttccacaaacgcacccacacacacacacacaaaaaaaaatactttatacaaatatatcttgtaccaaaaataagaaaaaagtatttctacagaaaagcttttaaaaactcatcaaaaaccctactgtaaattatcttctgctttaactttctttgtttttttttactataccctaaaaagattagttgcaattgaaaaaaaagagaaacgatgtaacaatattaataattgatacatgaacaacaaccgcatgttcaatgatagattgaccaccaactttcttttacactcaatagtttttactataatattttttttttgtttttctttttttcttcgttcctaattcatagccaggtcttggcactattcatttcatcaaagctacatacaaaattcatgtaaatagacagtcacaaagacgtttttttacatgaaccctaactccaaataactacggacattcaagcaaaaacaaaattttgttttttaacccgaacctcttcctatcggatttatacatagacacacacacatatatatatatatatatatatataaatttgtatgtatgtatctatatttttatttttttaagaaaccgctacttttccggttgtactcacccgcccctttttttatttttttatttttttatgtttttacgtttttggtttttcttaactccacgccatttattagcccttttaggatttgttaatctagccaatcaactatccaatctttgtcttatttattcttaactgtccaaccatctctctcaatcctaagatgataccaataaggtgatctttaattttatatattgaaaaagttactaattatgtatacctctatataaaccttgcataaataataccacacttgtgttatttgaaagtacacatgtaccttgcataaaagattaaacctctatccgattacacatcacatactgtggaaactactttctcgttccaataaacctcttttcttactaccttgtgttttgtcgtttttttttttctcctgtaatctttcaacaacttatatatagagcatgctcatttacgttaaactgaactaggtataaccatttgctatttttctttttattttttttattctgtttctgcctcctgtaccttttgtaattttatatgtccagtacagtttaatccttttcttctcttttctttttttttttttctttttctgtttggaaaataaataaataaaaaaagaagaagcagaataaaaatgaccaagttgaatatagtctccaaatccattttggaaaatattcgaccattggatgcgttgaattgctcttattcaaaatattcgttattgtttagaaataaacgtttttattcaattaaaaaatcaaatttcgttaaaaatacaaaccattgttattacagtacaaaatataacaataacaataacaatagtaactcaaatgctaaattctggttttctactgttattattgccgctattgcaggatcaattggttattatttaaataaccctttctcttcatcatcatcttcctcctcctttccctcatctttacctgtctcaaaacaaagtatcgaagtttcaaaatctaccctttccgtaaatgatattaaaccactagaatataacacagataaagaacagatcgaaaagttattagttgaattaaaaaatgtcctgaataatgatccaaacaactatacaaacacagccagtgaactaaaacaacattctgactctgattttaatacacaccatccaagcgaagatcagcgtccattgatcgtacttttcccgcattccacagaacaagtctctaagttgttgaaattatgtcatgacgctaatgttcctgtcgttcccttttctggtgggtcgtccttggaaggccatttcttaccgactagacatccaactatctgtatcgatatatctaagtatatggacaatattatcaaatttaataaaactgatctagatgttactgtacaaggtggtgtcccatgggaagatttaaacgaatttttggatgatcaaggtctgttatttggctgtgacccaggtccaggggcattgcttgcaggttgtgtagcaaattcttgttcaggtacaaacgcttacagatatggtacaatgaaagaaaacatcttgagtttgaccgtagtcttaccagacggtaccattgtcaagacaaagaaaagaccaaagaaatctagtgcaggttacaatttgaatgggttattctgtggcagtgagggaaccttagggatcatcactgaggttgttgtcaaatgtcatgtaaaatcacaattcgaaaatgtcgttgtggtatcgttcccaagtgtcgccgatgctgcagcctgtgcaagtaatatcacacaagaaggtatcccagtgaatgcaatggagctgttagatgacaatatgatgcatttaatcaacaccaatgatcaaacagaaaagaacgactggatagaaaaaccaactttattctttaagattggtggtaaaactccagtaataatcaaagaattgcttcaagagatggaaagggtctcgaaggaacacaatgcaattaattttgaatacgcaccagatgaagatactgttaaagaattatgggaagcaagaaaagtggctctttggtccgtcttagatagtgctaaaagattatctaaggatgctaagatatggaccacagatgttgcagtaccaatctcgaaattttcagaagttatcaataagacaaaacatgaaatggaccagtctggattgattaatgcaattgtaggtcacgcaggagatggtaatttccatgcatttattgtttatacaaataaagaggaattaatggcatgtgataaactggtaaaaaatatggttaaaagagcattagaagctgaaggcacttgtacaggtgaacatggtgttggtattggaaaaagacaattccttctacaagagttgggtgataaaccagttgatttaatgagaaaaattaaattagccattgatccaaataggatcatgaatccagataaaatttttacaattgatccaaacgaaccagaatatctcgaaaatgaattctgagttatacatatgtacaaaacacaatttctctctctctctctctctctctatatatatatatatatatatatatatatatatatatatatatatatattaatgtattatgtttaagaagagtaaattgtggttgtaaatataggcgcataccatatttatctctttctctatgttatatcatcttttcttaccttatcttgtcttatcttatcttatcactagtttgtttacaaaacaactgacaattcattacatttaaaagcattgcattcttttactctcattacctttatcaatccccttcttactaatacatatgtgtcagcaaacgcattctactgaaaaatgaaaaagaaaaaacagaaaaattcgagaacgtaattacttgatttggtatttgcggaggtacaaacgtatatataattgtacacgaaatagaaaatttttcattttttttttttttatttacttttttaccgtttctatctcaaacttttatcgaagaaggctgtctaatctaatctagcctaatcttcgtttgacaaaaaagtttaatgttttagatgagtcatacagaaataacttctacttattccttcctgttaatatgctagtctgtttgcttgttctcttttgacatattgacttcccatcaatacttctaatctaaggtagttgaatgctattaagtaatatttgtttacataaacaaagaaacaaatagatatctcacaaaaataagtttctttaagattagaaacaaaaccttgattatttgtacttattgcatctctactgattgacaataccagcttagagtaaaaacaattggtagataattgtttgtcaaattaaaaagtactatcagactagtagatatatggaagtataaaagaaaattctaaagcgactatatttgttcatatttttacttaaattaagtgtcaattagctagttaaaaaaaaaaaaaaaaagagatagaagctaaaagtaagttaactactttattttatataatatttttaagatgacagcgacaactttattaagaagaagtccattcaaaatggtatttactcgcactacacaattaagaaatcagtatcaaaaccaacattatcaattaactttacgtgctaggtttcaccaacaattatccccatctctggtgaaattacattcagaacttaaattagatgaattacagacagacaataccccggattatgttcgtttaatattaagatcaaacgtctacgatgttatagaagaatctcctataagtcaaggtgtagggttatcatcccgtttaaacaccaatattcaattgaaaagagaagatcttttacctgttttttcctttaagcttcgtggtgcatacaatatgattgctaaattggatgatactcaaaaaaatcaaggtgttattgcttgttctgcaggaaaccatgcccaaggtgtagcatttgctgctaaacatttaaatatccctgccacaattgttatgccagtgtctacaccatccattaaatatcagaatgtttctagattaggttcccaagtggttctttacggtaatgatttcgatgaagctaaggctgaatgtgcgaaattggccaaggaacgtggtttaactaatattccaccatttgatcatccttatgttattgctggccagggtactgttgcaatggaaatattaaggcaagtacgtaatgctagcaagatcggggctgtctttgttccagttggtggtggtggtttgatcgctggtattggtgcttatttaaagagaattgctcctcatattaaaattattggtgtagaaacatttgatgcagccaccttacatacatcgttgcaaaatggcaaaagaactaatcttccaggtgtaggaacattcgctgatggtacttctgttcgtttgattggagaagaaacctttagagtatcccaggaggtcgttgatgaagtagttcttgttaatactgatgaaatttgtgctgccataaaggatatctttgaagatactagaagtatagtggaaccatctggggcattaagcgttgctggtatgaaaaaatatattacttatttacatccagagattgaccactcgaaatacacctatgtaccaattttgtctggtgcaaatatgaattttgatagattaagatttgtatctgaacgtgccgtacttggtgaaggtaaagaagtctttttattggtgaccttaccagacattccaggtgcatttaagaggttacaacaggtgattcatccaagagcagtcactgaattctcctaccgttacaatgaacaccgtcatgaatccagttcagaagttccaaaggcttatatttacacttctttcagtgttgtagatcgtgaaaaggaaatcaagcaagttatgcaacaaatacgtacattaggttttgatgcagtggacatctctgataatgaattagccaaatctcatggtagatatttggttggtggtgcttctaaaattccaaatgaaaaaatcatatcatttgaattcccagaaaggcctggtgcattaaccaagttcttggctggtttaagcgaatcttggaacttgactcttttccattacagaaacaatggttctgacattggtaaagtgctagccggtatctctgtcccaccaagagaaaacttaactttccaaaaattcttagaagatttaggatataaatatcatgatgaaactgataatatggtatatcaaaaattattaaaatattgatttacttatgcctgttatttaatataatatactattatagattcacttattcattttcatattttaagtagccatttggatttatatatataattattctttaattcatttaatggcatgtattttaggtttatataaaaaaatgattaagagactctctgtaattatgtaaccattggtactgggactgatcgtaatcatgaagaattaaatcacacaagttaaatttcatgtggttttatcattaattcaaatatataatagtggatatcattgtatataataatatatgtgttaagcacacatacttatatatagtatgacgatattgttttagtactaatgacatgtatatatatacgaaaaaacgtagatccaacatcaacgtagattattcttttcaaataattttataaaactatgataaatatagttattatgtggcaatcaataaaagaaaaagaaaatgatataacattttttgagtacttcatctatctgtttatgtttaaatagaatgatattaaaataaaataaagaaataataagtaaatagtaaaaaaaaaaccagaaaaaggatttcgaaaataaaataaaaaaataagataccaaaaccaaattcagattttgaatatttatacgttaacctaatcactttttattattattgctattattggcgttcccttctctcatatcttttatttatttgtcttagaaaattctaccagtaaccttggaaataacatgtaagacaacaacagaaaaaataaaaccaacagctaaaaataaaacaaccaatgggtcaactcttaaaccgtttgcttcatcagtaaagatctttaggatggagttagaagagccaccaaagccagcacttcttgtggaagttggggtttgcttagcctgcttttctttaatagattgagcttgtcttctcttttgtaaagtacgttgaccacctggtggagttacagacattgttaaatcgttgatacttttttgctggttcagtagtatagtgactgtggatcactattttcaatacttaattatacattttgatattttcatcatctgattttcatccgtatcttgtatattttgttatttttgtataattttttttattttgttatttcctccactttttaatcataagatatatatcgttttacacgaaatgtttttggaacttgttaccgtactgttgttcaaatgttgaccaagaggggtatatgaattataaataacagagagatagaaagcatcacttactaactactaaaaaattttcaatgttttaatatcataaaaataaactggcaactatatgttgagtattcactatatatttgaaatggaagttttgttttcttaaataaaaaaaatgaattactacgttagaaaagagaaaatgctttcaatatctttgtaatatggtgttaatacttggtaaagtagtctgtgactgctgttgttgtctctcctgtaatatatgttgttgatagcagaggaaattttgatatactagagcagaatgttcttgacctgtagactttaaaaatgtacggtaatctgatattacaatattggaatgtgtgacacttgaagaggaagatgccgagtcatccaaagagatttgagaaaatgtagatggagatacctcttttgaggaatatgtatgagattgtgcagtttctgatctcagactatctaattctaaatgatccttaaattcttgggcatttattgttggatctgtttgattcaaaatataggaacggtttggcgaatgtattggagacgcaaaatctggcaattcaggttgtggagttggtaatttagatgaatctgaagacgaagcagaagtagttatggcggtatttgtttctgaactttcatcattgttattgttattcagcctttcagtcaatgaatgtaaccttgcatctatatctgactcacttctattgggtaacaagatagatagctcagatattgacaattttctagattggttttctaacaacaattgatcttcttgcatagaccatggaataaaatgcttttttcttactaccttttctgaatttacaggaatgtctgtaaaactatagttatgattaaaaagataatttgtagtcataggtgcctcccaattctttgttatattcaaagaagtattgttattgttattaggtgatatagctttttgacttctggagatgacagattctcttctatgttttgcagtgggtaattgatagttattaaaattgatagataatgaatttggtgcaataaccatcgatgatcttcttgaagacaaggcgcttgttggtgtaactaatgaatgtcttctgacaaatgaattctttcttgatttagatgtagtcaaagttgtatttaaagcagtattgactgaggggaaagaacctaataaagaggaagaggaagaagatgttggagatgaaggtattatgatggacgaaccacgtcttgattttacgaaaactttgggaataaagccgaatctttctgtatcatctgagttggcaaattgtggagagttgatagaaattttaggatttgctgaattagaagtgactgaatgagaatatgatcttggtttaataaacttcttaaccgttccatcacaagaattactactagtactattactactattattattattactaccatcggtagatgtgatattttttgtattgttggaggtcgtaacaggttgttctgaagaaataggtaatggtggagaagcaaatttattcagtaaagtgttgttttgagtcattgtttgaattgtattgttatcagctttattattatcactattcaaatcaccaatcatcttcctattatcaatagatgacgtggtaattgattcatgttgatcattagtattaataagtttactaatagaaatattactcttgttaagacttgaaccagaagtagagttggtagtgagagatggggatctcgaggaagaaatgttatcactaaataattttaatgaagctagttttgtcattttagaatcagatgaagaagaaacaacctgtggggcagatattgaattatatggcttaggtaaagtaattgtattacttgagtcatctttacttatattataattagtcgtattcttatccttccctttgtttttaaacttatcatcatcattgttgttatctttcgctttattcctttgtttcttttcattaaatgcaggatatggatttaaaattttgatctctcctggaaatatggtaacatccattaaggcagttttatttgattttaaattcccagattttagtcttctccatctaaattgacaagcattgggggttctgttttcaaaatattgtgaaatttctttccaacccatctttttaatttcttttaaatgacgcaacagtaagtcatcaatgggttcccatgatgaaggatgtttgttatgagtgttattacttatcaagtctttggaacttaatttatgtgtatgttttatgattgggtgatcgatatctgtgtcattttcaataatgtttggaatattaattttattgatatttttattgttattattacttgttactgcagcggtagacatattatatcaatattatttatgtatttgtttaggcttttttttgtttttctttttaagatatttataccggttaaaaacttgatacttctgccctataagtacatgcaaaaataaaaacaatgacaatattggttatttgcttatttttctttatttttttcttttgtggtttttatccaagtgatatagtcgatttggattacttcctcgaggatgatagatgatcggtaaacaagatacaagatattatatatagaagcaagaaaatggttgcaacaagacgtaatattttgtaaccattagaagatagaaaagtgggacacgtttcaatgaacagaaggagattcagttaatggagtagaataggtaagataaaagataaaagaagattgtataacatgtagaaagagggagaagagaaagaaggagaaaaagaagcatatgaagacggtgatgacgataatgattataataacgttgttgttgttgtcgacgaagacaccattgtggttgtcatgtcaaaatcatcaaacaataagcttatgacagcagcagacaaagaagaagaagagaaaaaaaataataatacagaggtatgctactttattctaataatagatggataatagtgaaagaaaacagacaaagagggacaaaactgaagttgcaataggcatcgacaattaagaatacagcgtcataatgcgatgagatccgcttcgatgagatgagattaaacagtatttgtgtttttcttttgtatttttcttttgtttttctttattttctcttttttttattttcttggttttgtttgttttgtgtgtggagaccaggagaagtgacagttgtcgaatacaccgcacacccatgcaccacacctctgttttctcttatgtcctttcttcttcccccctttaatttgttttttgtgtgtgtgtatcttcccctcatttaaaaagaaaaaaaatcatcgcggaaagcctcgctcaagtggagctccgtgttccggaagaggaaattagtgaggcggaggcacaacaaagaaacgacaatagagaaattgacgtaaacgggaattacatcgagactttaatggagttagtaaataaaacaaaataaaaaaaaaagaaaacaaaagaaaaaaaacagctcaaaaaaaatttcctgtttgggatggatcgtgcaatcaaggcatttttctattactttttacaacatatatagtgaaacttcaaacacattacattagagtagttagggctataaactattttctttcattttttttttgtttgtgaataaacctattcttttgagctaccaaaaacaattatttactttgtgattgattgaaaaataaaaagaaaaaaaaggaaaaaaaaactaaaaatcctaaagagaactgcctcattttggatgaaagtaaagcatgtttgcaggatggtgtatttccgtatccttttcaaatagaatagctcttagaggtatcttttcgatctttttgaactccagatactaaccgtcaatgaatactactgaaacaaaaaaaaaaaagaaaaaaggctcaaaatgcattttctttactacattataagccgaaaactatctttctatctttttcttttttttttgttgttgttgttattgctgtatgtttgttctttcttttcacttacacgctcaacatttaatatactattaggtttcaagagaaaaaaaatacatgagaaaattgagagtttgtaagcaggtcttgatattctttatttcattaaagttatacataaatttcttgtaattcgatggctatgaaaaagtcttctccagaactctaatttcaaataatttcaaacatttgagaaaacaaataatattgtttttttaacctaaacttctttttaatttgtaattttttcagaaaactcacattttttctaatcttatttaaagggattcagtcttaggtaactatatttccttctttcaaacacattctagatttttttttatatgttattaccagatagagttagacgcaacaccagttaatcaaaacaaatatactaatatatgaacacatctacaactgtatgaaaactttaagagacagaagtcagtattactgttttagtaattgtagtaatcataagtagaggaaactttgataagagatgttacatattttcatcattattcccattaaatactgccttagatagatagatatttaataaagagcatttattattttataacgctctatttaagtttttagattcgtcttagtaaattgattctctaaagatagtcaccatttactttttttgtttcataaaacaaagtaatcaactaataactaaaaagaaaagaatacaataagaaatttcttttattttagcgtattccttccttttttgatacatcttttctgtgttttgtttctatttaagttattccaataatatatttgacttttccttttgttttcattattacaacaataacagtggttaattttattgtgaatcttttccattttcggtaattatattttagatcaattctttaactaactgcaatttattctttgcaaaaataaatcattcaaaaatagtaaaacaaaatatttacattttatattcggaaatctctattctacattctgattccttattagcctagaaaacttgattcaggcaataaacataaacatcatctagatcaaggataatctttctgtataccattgcatatttaaaaagttcttaattaagtaaatatacatgtgctaaattttcttcaataaagttacaactactagtatatgtattacaaaaacacattcctcatttaatataaaaaaaagtttttttagttaacgtagtagttaataatactaataaaataaaattatagctagctatcaagcaactaagaatttatttgaattttcattattttgcagatagaaggaatatcttagaaaatattatttattataaatatatataatctctattaatcatattctttattatcctcttatctattggaaatctttttctaaactgtgcgtaatctataaaaatatgagaaaacaaaaaatattttaatctaaaaaattcaaaaaaaaaagtagaggtaaaacatcaattaaatacccactacttgaaaaaaaatatcttcaaagtattttgcctatactgtaaaacacatttgtatttccataacattttttaaaacaggaaatttttatttccaatttttcttttctatttttgttgaaaagttgcccaaatttcaatctttattactcaactatttagacaaattattcaatgctctctacacattcattttatctttttaaaataacttatatatacaaataaaaaaatacattggtttacactactagaaagatctatagatctatttgtatttttattcattgtactacaatgtagttaaaattaagtgcatggagatattactacaattttcattattattaatagaattgataaagataaataataaaggaatagaaataaaataacgtaaaatatgaagtttcttagtaataaagataatttaacactacaaagctgattagaaatgatatatacagtgaaaatatcagttacatttaattcattaatttaaacacacccctctttccctgtttctctctcttttttctatatttttaaatgctttttttgtttatttacctttcagttttggctttttgaagatttattctcttttgaatcatcagtacccttatccttactatttttatcactcaaactaacatttccatccttaccgatattttcttcttcttcttcttctccctcttttccctcaacgtcattaactattgaaatctggccttctgatgccacctttttaaatgtagctaacatatcgaccaaattgcctgtaatatatgtattactatctgaacctgtagtcaaatgtattccattacctaacaatgcttcaattgggaatgcgccaagttcatttcctttctttgttctcttattaccatcttcactatcatcggcatctgtatcatcaatctccatggaattttcatcgtcgtctgcactagaatcatgattaaatctttcctgtggtttctttgtagtgatatcaaatatagatttatcgtctttaaattcataataattatatataacttttcttttcaactcaaatgatattggacgatcataatttttagctcttattctctcaaaccattgttctacagattccccatccttcaataaagcaacaatagtgatactcatgttgtcacaaccgattcctgtaccttctgtagttggagaacaacatacatcaatgatacgagatgcgatatcatttaaagacatatcacctttcttgataccataatgtactagatcgacacactcttgagatgtcaaacaatcccaaataccatcgcatgctaagataacaaattcatcattttcataatttagtttgtgttgaataatatccggtacacaagtaacgatttgttcgtatggactcaaattatcattggatttgaattcaaaatcaccgatagctctagacaaagccaagttaccattaacccggtccatttccacgaatccatcagcagccacaatacgggacttttcagaagtcaaagttggtttgtgatcgaaggataaagctttagccagaccaccagtggaaagaacagttctactatcccctgagttaccacaaattaataggttttgtaatttggatattaaaatggtagttgcagtacagccactgtgatcatttttcaagattgggtcctttagcaattccttatcaacagatagaaaagtgtcgattaaggctttagataaatcaccattttggaaagatttttgtttttgtaagattgaggtcatcttttcgccagcaaattgagcaacacctgatccaccgtgtccatcaaaaattgtatagaatgcaatataatccttatcattttcgggcaaaacatttggctctactatatgtgcatcctccatcgacattctccatccttgcatggcacaaagaccaaaagccgtaaacaagtcttcgcctgaatgatgttccttatctattactggattagatagaatctgtcccatatttacttacttattttttttcttcttcctttctttcctttaatcaaatgagtcgacttctgattatttatatttagacaaaaataatttaataatacaactcaattaaaataaaaaagctcctctattctaatgatctttactttattttcttttttttttggcaaggtatataacaaaaaaattccaattaaagaagaagacaacaaaaaagatcccaattaataatcaattgattagtatcctttatcctgtattgagtttatgcctattgaaagttcaattgaatatgagccaaaattgaaacaaaaagaaaaaaagacaaagggaaaacaaaacaaaaaactaaaggagaagcaataagttatacagatcttacaaatacgaggtatctatgatatacaagacgacaagaaaagacgtggaggaatgagcaacttggtaataggcgataaatcaatattggtatataactaacttctcgaatgatgtgttataagttgttcttatttcttttttttttgtcttcaggtttttctcaaagaattttttataaaaaggaaaaagagagaaaaagaaaaaaatgaaagaacacctaaactcctttttattttttattctgttttttttattttttatttttttaatggcggacgcattcttttttctccgtttgtttgtctccctcctctgtgtctcgtgcccaccagccctaatttctctgtttccaagccctagtttttgtcaacggtacaacccagacacccacaacgaaaaataggagcggcaattcgcgggacaaaaaatgcaagacatcggtaaatttggtgtgaatcatcttcgacgaaggcgcaaaatgcaccgttcgtttatcgctacattcaatcgtttgggtgtacggttgttgttatcgctgactcatcatcgctcaaagttgagttcgaaaaaaaaagtggtaaaaataaaaaaaggcgagtcttcaatcaatttctctatctctgatccttctatctctttttttttttcatttttttgatttatttatttatatatttatttatttttgttttttcgaaaaacttaattattgaaaaatctggaaaatataggcaaggtaggtacttacaatgaaatagtcatagatcagagtgaacatacgattcttaattgtaataatcagggtagaaaaactttccttgttaaagactattgtagttcttaaaatattcttatttcttatttcttatttctttttctttttctttctcttactctttctcctttttgctttttccttcagttgtgctaatcggccatattcattccaacttcatcatacacttaatttgttctgttattgtccttttctactatacattaaaaaaagaaatacctaaaagaaaaacaagcaagcataagtatccaattttatttgattaatttacttatccacttacttattttttttccacctattgaaaccgacactactataaaacaaaatttcttcatatcgacagtaccacataactgataagtttaacaacataataacaacataataatacacaacataatgagttcatctataaagatccaaccagacttaaatactcttaaccaattaatcaaagaaaatgataattcttctatcaatatgtacccagtatacactttcttaccagcactagatttaactccacatgtagcatatttaaaattggctgaccttaataatcctgctagacatgaatcctttcttttagagagtgctaacactaacatggaattggaccgtttctcctttataggtatcaaaccaagaaaaatcattaagactggcccaactgaaggtatagaaacagacccattgaatattctagaagatgagatgaataaatgcaaattggcatccaacattcctggtttacctaaattgagtggtggtgccattggctacatctcttacgattgtgtacgttatttcgaaccaaagaccgaaagaccattgaaggatacgttgaaagtccctgaagcctatttgatgttatgtgacaccataatcgcttatgaccattttttccaaagattccaaatcatccacaacattaaccttaaagaaacctctttgaaagaagggtatgccgtggccaccgaaatcatctccaacattgtcaatactttaaacgataactctaaacctatcccatatcctgagcaacccccaattgccttgaaccaaacttttacatccaacatcggtgaagaaggctaccaaaaacatgtacgtgcgttgaaagaccatatcaagaaaggtgatgttattcagggggtcccatcccaaagagtcgctagaccaacttctttacatcctttcaacatttatcgtcatctacgtaccgttaatccatctccatatcttttctatatcgattgtctcgatttccaaattattggtgcatctccagaattattggtcaaatccaataataaaaatgtggtcgttacgcacccaatcgctggtactattaaacgtggtaaaacacctgaggaagacgatgaattggctaacatcttatccaactcattgaaggaccgtgctgaacacgtcatgcttgttgatttagcacgtaatgacataaatagagtctgtgacccaatgactacgaaagtagataaattgttgactgttcaaagattctctcatgttcaacatttggtctctgaagttagtggtactttgagatcagataagacaagatttgatgcatttagatctatcttccctgccggtactgtttcaggtgctccaaaggttaaggccatggaaattattggagagttagaaggtgagagaaggggtgtctatgcaggtgcagtaggtaattggtcttacgatggcaaaacaatggatacgtgtattgctttaagaactatggtttataaaaacggtattgcttatttacaagcaggtggtggtatcgtttttgactctgatgaacatgatgaatatattgaaaccatgaataagatgatggctaatcataacactattgttcaagctgaagaaatctgggccgccaaagttggtagtatttaaagttattccaattaaatataatatataaaaaatgaaagtaaatagaattaatagtttgaaaaactttaaagtaaacctatattcactacttctatattgacatatatataaaaccaacttctcttttgaaaacgaatgttgaatgcgttaaatttataatatacatgatatataataaaaaatacttatctaaaaaatgcagaataaaatcaaaaagtatataaatataattaaaataataaccacccgatgttgaatcagaaataatcgatatagatataacactatcaatatcaattacctatatttttattattatgattgaaagaagaaaaaaaataaaaatgcatatcaatcaatttatttttggtacttggtacggaagtgcttagcagcagcaaccatattagtcaaagattctctcgtttcttcccaacctcttgtctttaaaccacagtctgggttaacccagaacttttcagctggatatgtctttaagatattctcaatcttagcagtgaactcttctaacgatggaactcttggagagtggatatcgaataaaccgaaacctaaatggtttggataatcacggaattcagcaatatagttagcgtcatccttcttggagaattcaatagagacaacatcagcatctaaagccttaatatgctttggatccaagtcagaataacagaagtgagagtgaatttgagtgtcattggccacaccagaggtagcaattctgaaggcttcagcggcccagacagtataagcagccctttcagtgccttctcttaatggcaaaccttctcttaaggctggttcatcgacttggataatcttaatacctgcgacttccaagtcgttgacttcatctctcaaagccaaagctaattggaaggcttgagtcttttgatcaatatcatctcttgggaaagaccatctcaaacaagtaattggaccagttaacatacccttgacagccttcttagtaatggattgggcatagacagattccttaacggacatagcctttggtctagataagtcaccgacaataattggtggtctaacatatctggaaccgtaagattgaacccaaccgttagtagtaaaagcataacctttaatttgttcaccaaagtattgaaccatatcgtttctttctggctcaccatgaactaagacatctaaatcgatttcttcttggaatctgataaccttttcgatttcggattcaatgaacttttcgtattcttcagcagtgatagtacccttggcaaacttgtttctgttaattctaatatctttggtttgtgggaaagaaccgatagtggtggttgggaataatgggaagttaaatctcttttgttgaagaggtaatctagtggcgaatggagcagctctagtagacatctttttatcgatggaagcaactctagcttgaacagctggatcattaatcaaagaagaattggttctagccttaatagcttctgcattagcagccaaagcagcagaaacatcctcaccggagacattcttagcaatagtaacgacttcagtcaacttttgagtggcaaaagagaagtagttctttaattcagcatctaagttcttttcattttctaagtcaactggtgtgtgtaataaagaggaagaagtagcgacaacaactctgtcttgacctaactttgcgatagctttgttgacaaattcagaagacttagcaaaattattcttccaaatatttctaccatcgacaataccaacagataaagtttggttgtcaccaataatagaagcagcttgttcaaattgttctggagctctaacaaaatcgaagtggtaaccgccaactggtaagcccttgatagcttccaagtttggaacgacagtaccaaagtaagaagttaaaatgatatttggtaaacccgcttcttgacccagcttggtgtaagcagtcttgaaagcatcttgaacattttgtggtaaatctaagactaagacaggttcatcaatttgaacgtcaacagcaccagcagcagccaatttttttaagatttcaacataaagtggtaataacttgtccagtaaggataatggatctaaatccaaagaatccttgtcagccttacctaggtgtaagaaagatactggaccgactaaaacaggtctagtttgaatacctaattctttagcttctaagaactcatcgactggcttttgaccattcaatttgaaagtagtagaatgggagaaagttggtctcacatagtggtagttagaatcaaaccacttaaccatttctaaggcggtaacatcaacggccttttcagtttcagtagcccttctttgcaaacctctacccatagcgaaaagtgtatcaattaatggtaagtcatatttggcataacgttctgggataacattgaacaagacttccaagtcaaggatctgatcataaaaggagaaatcgttggatgcaataatatccacaccagcatccctttgtaacttccaattggcagctctaatttctttacccactttgaataattcatctacagaaatcttaccattccagtaggcctctgtagctttttttaactctctattaggaccaattcttggaaaacctaaaactgcggatttaaccattttctgtatatctagatatatgtgtagggggttgttgcgttgaccaaagtcactgtagttgtgttattcattattcagaaagaaaagtaataaggactgtaaaaatgttagtactataaaggggaaaaaacaagtgtagaaaatacatgatttaatctagttaagatttatttatatacaaaattttaaggttaagtaagaaaaaaaaggagtaagttaaatgttactatgaaaaagatgatactactattattactactgctacaaacaaattcttacaacaatggcaagaatctgtatgtaacgatagaatattttattcaccaccactttttttcagtttaattccctagtatgtatatttctttcaattccctcttaaacgataagagtcatcgttcaaattggtcaattttccaaaattcataaggggaaaagagaatctagggttcaatggaatacaaaagtctacttactgttaaagggataaaataaacaaccaaggactatcgttttattaaagaaaacttagggttataatgctctttttattgctgaaaaagcaaccattggaaaattactaaagtagtttgtgctctcttttaatagtataaatagggttataacaatatattgttttcaattaaggaaaatgattgtattggagattagggtttgtaattctacaggaaaatattgaacaacaatttttctccgtttccggctatcagtgttttttttttgtaacactcatttttagggaaagaagaagaaaaaacgagaaagaaatttgtcggtgactcttttttttttttttttcgagaataccggtatccctttttcttggttcttcttaattttgtgttgactctgtcccacaatttttgtgattttccacatatcccagtttttctgtttttgaataaatgtggaaatttttttaaaaaaaaaaaaaaaataaaaaataaaagaaaaactgtgactgtgggaagtaaaacttttgtactcactgacaatttgtgtagttgtctaatcgtggagagaaaaaggaagaaaaacacatttagaaaataaatagtaaccctacttgagttttaagggctaaaagagatatttttgatttttttaataataccctagaataatataatgtaaactgttcagggttgataaaataataaattttggttagtgcaaatattaatagtatttttgatgtagattataaagacatagatatagatatagaagaagaaagtagctttctccatatatacggaaactaagttaaatcgaataaaataaatcaataactataaatttaaacatcttattaaaacatagttccaataattggcattattaaatcaataaacttagaatacaatagaaaagaagaataagcaaggtataaagaaacaaaataatttcagatagattaactatgtctaagaaaccaccattagtcaataaatatcaaagagaattgtctaaatatgatgaaaatcaaaggcaattagctggtctagagaaactttcagcaacatttctacgaaaaatatctagtaccttacgtatattggaaaatttagaacatgatgatttaattaaatcgatattcaatgaatcagaaatagatagtaataacgctaataatactgctaacaacaacaacaacactatataccctcccatgttatctgaggaagctattcgaattgttcctgcgttacaaaagtataatgacaggataatagagatttgtaacaaatattcaaatgataaaaatttttcaaatatggatgatatgatagatgatgagatccatgaaaataatagtaataataatgaagataatgaggatataacaccatctttaagggagagttataactttatgaaagagatacctttattacataaagatttagaaggacaatcataaaagaatacacttatatatatgcatgtatgaatatgtatttatgtagatatatagcatataatataaattaaattaacgtttaattcttttttttaacagttctttgagaataatattgattatctaataattcatcaaggcaataatttgtgatcttagtgttgctatcacatatcaatttattagttgataagttgtattcaaaagtctcttctttatatgccacatcgcttgtccatgctttttctttaaatgctaagaatttatccaacttggaaggtaatgaaactcctacaggttttcccataatactcagtgtacaattccaatctaattcatccaagatttcataaccttcacatgtcttattaattaaccccaatacaaagaatgctgtaaacttaatactcgtaatgtcagaatcataagcgatacgaacgatatctgttacaatggaataattgtccaacaacgaaataccaagtacagttgaaccaatgtaacctaaacaccataacatgctcttgattgtggttggatcgatatctttgtgtctaccaccatctaatgtatccacatatttttttataacattaatacattttaataagtcacccgactgagttaataaagatattccgccttctgtcttagaaagactctcatagaaatgcaacggcaatttatcaccaacattgtatcttgttgaattgaatatagaaagtgatgactgaccattggataaaaactgctccataataataacatactctctattcttagtgagaagccatgattttctttctttctccacaaaatcaatttcgtctaacattttaaagcccaatggtttacttaataattcgaacaatataggcgatcctataaataccatttggttgaggaacttcttgatagatattttagtattaatagatgcatcatcgtttaaaatatattcgtatagagctttgtcagcaatagctaccacagaagaagataaatcgtatagttgtcttgtcaatagttctaatttcaatttttgaagtttggtaactgtgtttgaatcataaagattataatcatgcttatttaagttgttcaatctgtcacctataatttttgttgcctttattctaagtttcttgttggttgcagttaatgctttcccaaatataaccctacaatgcactgaataaacaagatttagttctggaagagtcaataaaagaaacttcattccaatgaaagattcctcttgaaacatcttgtatatcacagtaaaaaaattccattttgttaaaatcttgatcccacttaacgtttcggttaacacaccaacgaatttaaaataaccatctacaatcttagtttttaaggtttcctcactaaaaatattatcattagtatttccttccatagcacggtatagtaatgacgctaattgtggaactatcttagtatcttcaagaaagattttcagcccttcagggtttcttgttaacactttaaaaaatttacaacctacttgaatgtacttttgtgccaatcgtgttcctttatcaatgttagaaaatcttaatctaagaggcctataaaatactagtaatctccgaataaattttgtggatcttgccaattcttccaattgtcttttattcatcagtggtccctcaagtaattcttgaattacatcccaattccaatgagaaaaatctttagtctgaagtactttgctgtccaaaaccatttttctaaaccttaggtcatctacatttgtaactaatgaattagttttaacggactttgtatactgtctaatttgctctttactgtctatatcacccatacctattgtatttctccctctgtttaacttgttaacagttttgcaaaattgaaagatttcttgatttttagacacatccgtattatgtgttttttttaaactgggtaaggagctaacatttaataagttggacctcaaatttagatattcacttagtaataatcgtgcctttgttgacattgtagtatgcgaatcctctcctaaagtgcagttgattaaatcaatcagataattttcaaatttgcatctgctcagtacttccaacgttatagctaacacttgattgcttggaacagaacctttaagaatttctgaagttttagcattaaaaattgcattttttgctcttccttttaaggataatggtttaatcgttaaaatatcaagaaaaatatctattaaataatgagcacaaagaggtacctgaaaaaatatcaacaaatccttcaagggtttaaagttgttcatacaatacaacataaatcctgcataatttttcaatgctttggttattaatatagtgatagattgtaatttctcgatatttaaagtcttttttgtgttcatatcagaaaatacagatgaaagtactgtaatatcaaaatcgtcaatataatatatccttgttgctggatattccatcaaacttaaaattgtgtctaatataactgaagaaagttcgaaagaactacattcttgtaatagcttacttagaatatgaatgccctggcacttgttgacaatcttaggagatttaatgcaaaattctaataatgtttccacaaaaagaacttttaaaatatcgttattcctttcaatacaattaattaatatctgtgtaatttttgtagttataccattctcatattctgacattctttgtattaactttagtgcttgctccttctctacttgaaacttattgtccttcataagagacttttctagaaaggtctcaatattcatattaaataagattttaatgaattcaggtccattaatcaaatatcgacatactctatatgtagtagcgcttatcaaacagtcgtcacgaagaaaatgattcttaattgtcttcataaatgatgttagtactagatcatttctgatttctgggtgatctttcaaaattttgattagattatttgatttttctagaataaattccttggagatatcattttcttgtaaactttccatataatcactaatataccaagtagcactttctaaagttgctgtttccatcttatcttttactggatgagtgttggtaatggcttttattgggctttttttatttttgattaaactcgcttcaggaagagattgttttgaggcttccatttttggaataatgaatacatttgattcttgattattttttgattctatagatttacaatcatcaggatcaaatgaactacttcttgaagatatattacgcagagtagtactaccaatatcaaaaaaattatgtggtctgttattagtatcaatggcattggtttcgtttatgttaattgattttacgtatttgttattagtattttccaaatgatcttcggaagaagaatcttcatgatcactaattgaattaagtgatgaatagttatctttcacagccttgtattgagattttaaggtttctaattgtctttctaatttcttaaggttcatatcgatttctcttatttgggtattagtacgaattctttgtgaatgtttttgtaaatgttcagtggaataagttgcactaaatatagccgtctctgaagtgtctctaaatttttctgtatcctgtttcttacttcggagtttaaataattcgttttctaactgttctatttctaatttcaaattttgtcgactttttgtaatgctagtcttaggaaggcctgtagaatagggactaattggggaggtcatatttaattgtggagacataatattgtgaggttcatttctttttgttcgtgaaaatgaagttgcaagtaccaaagattttttattagagtgatcattattaagatcagtgttagaattcatgatagcattattagatgtattatatatagaattccttatattactagtattataatgaggtgttattgacctacttggttttgatacattattgttttgttgttctatattatctttattcatggttcggatagattcttatgcaataataagacaaaaaaaagatcagcccataaactaaagaaattgaatattaaggaaataaaaaaaataatctaaaaaataaattgacagaatataacaatttaatatgttggtatatatatacttcgtagttcgttttttaattgtaaatgttgagcgttttctaatagctttgtgactggcaatgatgaccacatgtatacaaaaatattattttttgattcaagatcggattttatttatttttttcaaatttctcaaaaggaaaatatattaaaaaataactattatggtgacaatcattataaaagagtttaggataggaggaggttgaatattggtacattatataataaaagtgcgtatttacaaaaggagaataaggttatgtgtaaaatataataatacagtatggttaaattattttgtcaaagagtcccatatttctattaaactctgttgatcatcagtaagggaaaacttatcttggtgattcattacattatttcttgtattcaatggttttagtaattttctgaatccagtagtgaattcgtcgatagagtcaatatctgcaatccagcatgttccaaaaagcaccattgaaaaaatacctgttgacaatcctatagataatgtaattgcttgtagtcctagggtattatgatgatgaattggaattcttatatttgattgaaaaacatttggattgtctataatttcaaagttgcaattgcaaaataaataagcaaaaataaatgaaaagggaagtgaacagtttatttgttagtaattgttgctaaacatatatagacaattttctatattattacatacatttcaaactgagtaaagttctacgtgttaattttgcaaatattaaggagatggcagaggcaccaaaaaacctcagaaattctctgtttcttcgattttgatcaatctctaacataacggtatgaatggaagtacttgtgtttttatagtgacaataaggtatgctggtaggttattgagtaactttttattttctattatatatatatattggaacagaagaattaccaagtttcctttttttcttttcttttactttttgaaaattccataaaatacaaatagtttaataaaaagatgggaactggtttaatggcatgaatattttataagaaaaaggtttcatgtcttaacctattgaaatggtaggtatataatttttcggagttatattctaatatatatatatatggtgtatgtgtgtgtgtaattacagaaaatgtacggaaaattactttaatttaatcttgtctcatttttaaatatctttttgtgactttatctttctttatgatataaacaacagccccccacccagataatgcatcacggtcagcagcattcaacaaagactgactaatagtttcaaataaatcatccgcctctaaatttggttcatataatgattcacacataccgaataattggtcagatgcagtaccacttactataaaatctttagcttcatctatacaaccaatcaaatcgaaacctgcaatgaatggttttcctgtttttgaatttatcccagctactacaggaccaacaaaataaggaccaaatctcttttcatacaatgtagaggaaaccagttgtgtaaaagtttctggttcaataggtctatcttctttaagtttatatatgttagttttataacggaacacttgatttagtgtaatcacatctgtagctaagcctgttatgcctaaaaagacatgaccaaaattagatattttctcaaaattattagacacaccaagtgattgatttcctagacgtaaatcacacgcaatggcaacacagtccttacctgccatagccaatacaataccaccgttaatagaacttggatcagacattgtggaatattatatttttgttattttttatagatgaaatattgattatcaaagtagaaataaaaaaataaaggttttttgtttttggcttcttatgtgttatgctgttagttttttttttcacttacaaaaaggaataaataatattgaccctgttattgcaaatagtttgaatatattttgtcaattcaaatgatgttaattgatcttaacgaatgatatatatgtatctaaagggattaacttgtcaacatgaaccccgttttgtaatatataagtagtttgttcttttttttttattttaaacttcttccatttcacaaagtagtggcaaatttacaaagggaaaagggaatgctcttctaaacatagaaaagaaaagaaaaagagtacgagaataaaaagagcaagacgctttgaaggatggttgtcgtaccaaattatatcagctgaatttattttcgttcaaaaagatttaaaaaatatgatagtttgcattgtcatatttcacgattttttgagcaaaccatacatgcacccacacatccacaaaaagtcactttttcaagaattcttttttttttccatcaaaaaagaaatcaatggccagcatggcagaaaaaattacgttttagggaaattttttttatcagttttgagtattctcaaattgggaaaagatccccgatttagaaatttttgattcctgttctattttctttttttatttttattttttggttttattttctcgaaacttaaaagtaaaggacaaaaaaataaaaagttttttttttttttttggtgatttcttttctttgtgtgttgtaagtataaatagaaacgcgaaagttgcttgaataaaatacagaaatgttatttcctgaaataacgcgtaaaacaagtacgggctcagtttcctattgccacctttatgaggtttgagaaatactgatatcattgctacaataataccgtaattagatagaataaaggaaagataaaacagaaccacaaaacaaacaatagaactattagcttaggtcaggtatgagtgcatctcaagtagaaccatcattgtctttaatgtctacagctccaagagaccaaacacaacctgaacaaaattttgaagatccagatcaagctgaaaaccatcttttagaaccacagcaatcattaggtggtataacagaccaacatcctgaattaacaggggcaggtgttaaagagtatgatgaacatggaaaagagggaggaggaggggaaggagaagaggatgtagcactagtatcgtttgttcccctagaaaagttacaagttaatgggattactaccacagatttgaagaaattgagagagaatggtttacatacggtagaggcagtagcttatgctccacgtaaagctctgttggaaattaagggtatatcggaagctaaggcagataagctattgaatgaagctgcccgtttggttccaatgggatttgttacagcagcagatttccatatgagaagatcagagatgatatgtttgacgacaggttcaaagaatttggatactttgcttggtggtggcattgaaactgggtctatcacagaattgtttggcgagtttagaaccggtaaatcacaactctgtcacaccttagctgtcacctgtcaaatcccattagatattggtggcggtgaaggtaaatgtctttatattgatacggagggtacatttagacctattagactagtttcaattgcacagaggtttgggttggatcctgacgatgccttgaacaatgttgcatatgctagagcgtacaacgctgatcatcagttaaggctattagatgcagcagcccaaatgatgagtgagtccagattttctttaattattgttgactctgtaatggcattatacagaactgattttgctggtcgtggagagttgagtgcaagacagatgcatttagccaagtttatgagagcattacaaagattagcagatcaatttggtgttgctgtagtagtaacaaatcaggttgttgcacaagtggatggtgcaatgagcttcaatccggatcctaaaaaaccaattggtggtaacattatggcacattcatctacaacaaggctggcatttaaaaaaggacgtggatgtcaaaggttttgtaaagtagttgattctccatgtctaccagaagcagaatgtgtatttgcaatatatgaagatggtataggtgatccaagggaggaagatgaataaatgtgcataattatatgttatttttattattagtattattataattgttgttgttgttattatcatgactattttttaaatctggaatcatattaaactacccatctaatcgcattaccttcttcaattcatgttaatgtaaatatatttgttagtgtaccccaacatttgaaaaattatacatactgtaaaccatatacccttgaatatatgcatctatatctatgtttaatatatttgataatgaatactttatacgtatcttattttattccaggcttacgtattctgaaaaaggaaagaagatctgaagaattaaaacaaagacaaaaagcgaaggggaaaagaaaacaatggaaatagcgggttattgttttttattgtttctgatagatttattgtttatggataattacgtttctttcttttttttttttctattttgtttttattatgttgcgggagttttttgattgatcttgctaaatgttccatttggtttcctctctagcaagttttttataattttgttgagtttccctgagttttgggatttcgatttattgctgttaagatgggtgttgcaagagacaagatgcaacaggactaaggtgaatgaggtatatacagtctaattctctggaaaacacttttcttttcttttcttttcttttcttttattttgttttttgtttttctatgtttctaatttagatgttgacccttttatttacatagggatcaagaatatatttaagactatggcgtagttacaattgtattccattctaattgatatcctgtaatttaagaaatattaacgcagaacttttgcgacctatgtctctgacatagctttttattccctttctcgttcttatttgcctgctttgcccttctgtttagtgtttttttgaaatataaaatagtcatagcataggtttataagttttttatgattttccataaccttcactgattcaataaataaaagtttcatagctctttaggtcgagttaataagttatttaaaaatatatattttaatatatttgtcaaaattatcaattactattaatattccatattgttgtttaagatattagttattcaattgcaatttatttcccatagatcaaaagaatttaggtcaacaaaaaaaaaataaaataaaataaaaaaagttatatccttttttaccaattggtacattaattacttgctcaattatgcattttaaaaagctgttacttatcaataagaaggaagagtattacaatagaactaaagagagtaaagaagtaacatataaacatacaaataatgatattaaacttgatcatattataccaagaactataattgattcggacaatattatctttactaaaaatttagatttgactacagttaaaggttcagattctaaagaacaagattctgattattatagtactgaaaaatgttattttcactcctcagttgatcaacaaacagttcatgcatctattccattgttaaatagtcattatttaccatttggtgatggttcaaataaagtatttggatacgaaaattttggtaacacttgttactgtaattcagttttacaatgtttattttatttagattcatttcgtgctattattttatcgtttcctttgcatttaactaatggctttattcgtgatagtagtacacctacaaatagtcataataattgcaataataatggtagtgtaaatacattaagaagacatagaaagcgaagtatggatggaagaaaaaaaagatattttactatggagagttttcaaactattataaaggaaaaggacaagtgtcaaaatgataaacaagtaaactgtgttgaatcagacaatagtactaaagtaaataaggaaaagcctataatgaataatattagcgataatatagtagatcagaaccaaactaaatcatcttcatttaactttttttctaaacataaaaaaaataaaagtttatctccagaaacatataacagtaaagatcctaataataaatctgttgttaaagatttaagtgcgaatatatatgcggatgacattggaccagctcactccactgttatgaaagctgattatgcaactgaaaagttacatgaaggctgtcagaggatcattgttggcagaagtaattgttttccaatcacctccactgaatcatcttttattgtaacctcttctatttcaacaatacgatctgaaagtcaattattgacgccatcttcaaagttatctgatacaaatatagaaaaattgttgaatcccgatcaaactaccttattaaaagataataatggtattcgtaattctgatttttccattaataattttactagtgaaaagaggaaaaaatcagcactgatacatggtcctattataaatattgattatatggtgaatgtatcggctaaaccaaatatttataatggactaaaagatattttcgaatgtattactgaaaatgataggcttacagggattgtgtctccattacaatttatgcagatcttaaagaaagaaaatattttatttcgaacatcatcccagcaggatgcacacgaattattaagttttattctaaatagcatagatgactatttaaaaactattaatcatgagggaggttctaactatgtacctgcaaactttataaattttatcgaggaccaattcaaaggttttatgaaaagcactataaaatgcttaacctgtgacagtaagacatcaaatatcgaatcgtttttagactttcctattgaattaataaatgaagatgagaatatcagtattcaagagttgtttaatgactacaaacaaagcgagtttttgaagggctcaaataaattttattgcaaccaatgtaattcgctccaagaagcggaaagatctgttacaatagatatgctaccacatattttgattttacatttaaagaggtttgaatattctgaagaattaggaactaatgtaaaattgtttaacaaaattgtttatcctctaattctagatgtttcttctagtatgagttgtggtaataaagtttacaaaagatatgaattaacttcggttgtagttcatatgggagttagctcaagacatggacattatatatccatatgtaaaagttcacagtatgggtggttattgttcgatgatgaaactgtagaatcagttggagaaagtacggtccttaaatttattggagataaaaataatcagacgactgcatatgtattgttttataaggaagtatttggaaacaatttccattataatgagaaatgtgagattagagataaatccagtagtgaagtagaagaaatagttagtgtatcagatattaagccacagagtaaagataaatatgaaaaaagaattgaaaatttaataaaaaaagatgattatataagagagttagaagagaaaaaactgcgaaggttaaacaaagagcatgagtataatgagataaatgatatggcagttcataatatatttagtcacatttcagaaagagattcaaactttattgttccacttaacgataataaactagatgatgataaaagtacacacaagactaataagagaaaatccttattgggaagttttatgatgaagtaacctacttttgctctgactatattataatattatatcttgaggactacgtattggtttgaatgatgactagtgattactacctatattttttatgttataataattaatctctgtttttcatttttgcaaaaaatatctaattaaatatatgttataaatagagaagcataatattaataagagtgagcatataactaaacctgtctgggtatgcacagacaaaaataaacctaactcttaaaaataatgttttgattatttttttctcactttcaattttgttattttcgttatgattatactggtggtgcgtaattaaacaagtaagaaacagattcaccattatgtaatcttctgatagcctctgctaaggtcggacttatatctacttgatcaacaacaggcaaatctaattctacaggtacagtattagaacaaatgattttagttaatctactgttgcttaatttttctctagcatcaccagaaaatataccgtgtgtaacaatagcgaaaacttctttggcaccatgttccaataaagtatcacaagctttcactaaagtaccacaagtgtcagccatatcatcgactaataagcatgtcttaccagtaacatcaccaacaagtaccattctagaaacttcattggccttctgtctttccttgtgaattagggcaaaatttaaatccatcttatcagctaatgaagcaactctcttagcaccacctgcatcgggggacactaaaatggcattgtccaaatcaacctttaacttcatatagttcaagaaacttggttctgcatataagttatcaactgggatgtggaagaaaccttggatctgagatgcatgtaaatccatggtaacaacattatcacaacctgctgtttctaataggttagcaactaatttggcagtgataggggcacgagatttatcttttctatcttgtctggcatatggaaaatttggaataacggctgtaattcttctagcagaggctgtcttacatgcatggattaaaattaataattccattaaaaaatcattaatttcttcttgaccgatccctgtttgaatgatgtagacatcttcatcacgaatactttcaccaatagttacggaagtttccttattggaatattgatacacaccaactttacataacggaatacctaaccttttggaaataagttcagccaattcaggatgagaattacctgctaataattttatgctatttgaagtcattttagaattttcttctgtagtttttaactcagatttattattaaagttttgtggaccctgggattctgtcattaaagatggtgagaatgttaacaaccatgccccatctacaagggtgacttgtgggtaggatgtgagcctaagatgacttatctcatcgacatgttttttattatacttttttttttggatatcatctaaattttttatctaaaattttttggttttaatcacttcgcattgaatgtaatttaaaaaaaaaaaagaaaaagaaaaaagaaaaaggtagaacattattggaaaggtttttaaattggcatgggctatttgatcaaggaggaagaaaaataggattataagaagattatgctgatagtaaagattgtaagcgaaactgtaaaatgattttgttaattatataatgggtttacagatttaatattgtctttctttgattaactacaacttatttaagaattaagaatgctgcaaaaaaagtatttaacaagatcctcgacctattagctgtatttttagaatctttcaacctttaatattagtttaccttgggctctttgtgttttcatatatgaaatcgcttcatcaatatcattccaattatacaccttatcaattctgcatgtaactacaccagtctttaagaattcaccacatttattgatccagtcgttttttgctgcagttttggcattaggatcaaaataaaaatgagtataatcataggagtagagtagagaaccgaaagcttttcgcatattggccttagggttatcccattgattataaacatcagtcttataattggcaacataatcgcctactgttgttaagtatgcaccatttttatgaattagataggatgaatgagctacaatgtcgtaacctccaacaaaatctaaaacaatatcaaatttcccttgtaggtattgaatttttatttcatcccctgttgtaggatcaaatacggttgtcctttgttcttctatcatagctcttaaaggtttactagatttccctctacatttcaaataatcaacatatattatttccccttccaaatcagtataaaatgttctcaaagcttctgcagaggaaccagtcgtgattacaacgattttcttggttaattgataatatctttttaataattgaatcgcacacatcccaacagaacttgtcccaccattaattaaaacattagaatcttgttttaaatagcctcttttatctaacttatccaaaatgttaaaagctgtacctaaaacaaataatgcaccagctgcttcccttggatctacattttcaggtcttagtaaaattggatcttcatttggattcactaaaatagctgtttgaagtgcacctttagctagatgtggatggaaataaataccaaagacttcatcaccttcgctccatttatctgttaagttttcacccacatgggtgataactccactgtattctcttcctaaacctacctcaccatatattgcctgcgtgtaaccatttttaattttcagatctacaggatttaaacctacataatttacatctaccaccagcttgtttttagggatgggtaatttaattttgttttcataagaaaaagtgataggacccttatcagaatggaatacttgtgccttcactggaatgttcttgacatgtcttaatggtctagctactctttgtaatttaacttcgtctaccttaatttcttttggtgcctcaatagttgggttagttaccaaattttctaatactgggtctccattcgttaaaattttgtcagacatttcaaattattagggcgtatgtctattttttatataatgctaaaagtagattggaaaattgttacttctaaaaggaagataattattagtcagatatgataaatttctgtggttatatatatatatatatatatatacttactcagcagatatgttattccgaaaccctttttttgtaagtgatattgattagtataataataatccattttattttggtatttgtttacaaagtttgtttacatttttttttttgtttttgttattttattcctcttggtatttttaggaacaaaagaaaaaaaaaaagcaagaattacgttcttgatctccatagtacatattggttagtcttatcttataatcagctattgtatagtaaaaatgaataacgaaaattaacaagttacataaagaaagcaagattgttaataacagcatggagttgtaagatactatcagtaaaaagtatgaagaaataaactataattgtgtacttatcaatattatatatcacaaaggatatacttgaataaagagagaaagagaaaggaaagaaaatagcaagacttatctatatttagtgggaataattcatatagttggagcatattattgtactttacatatatgtatttacaatgagttaaagtaatatcaaagttaagataatctaacattaacattcttgcctcaattcttctttatgtgcagataaagttggtttatcaccatggcaacagaaaagtgctagactcaaaaaacactgtaaggacggcttataatctaacatcagtacattctatcgtctttttttcttttcatacgaataattcggaaaaagttaagagatcttgtataattacctattctggaaattaatgtttgattaattatgttttttcttggaaaatggaaaagaaaaaaaaaaaagcaagtccaaattgtttggaggatgcgctccttgaaattctattagacacacagaaatatgattcgaaaacccactcccagacaaataatgttctttcaaggggaaagactattgcaactgttgctacttgccagtaagtaacctgaaacaccctcgcctcattttattcctctaatcccttccctcgtctttctagcaaacacgctgtgcatttgtttccctccacttttcttttcttcgtgtcaactcagatcgagttactcttgtagtgaggagggagaaggtcctgtggttgcgggaaaccttcctcctgtcttcctttgtctaatgggtattatccatcacgcttattctctttgtttgaccttgtagatttcggatagtgtgttatacacagactactattatatgttggtacctgggtattatctatattagagcatatgtgctttcttcctgattggcacccctttggttcttttagcaaaccgtaatcaaatcacaccagaacgtatgtaagaagtgcactatagattttgatattggcgttccaaagaaacacgtataatggcattagtctaaatagtttgaaaaagtagggaatgtggaatagagtcaagcatctgattattgagtactaatcagcaggtgtgagagtgttaatatttagaaaagaaagaaaactgaaattgaacaaaaagaggagagttatagaaaaattgttatcaaatttaccgagaaattgtatccataaaggtgattaggaatgagggatcgttatattacaatcatactgattcaagttaccatttaatctttggcttcaatattaatatggaaaggggtgaaaaagaagaagaattctgaaatagttttttgaacaagagattactaacaattggatatattaatatttataacatctgggattattgttattaatactatttatttattttcattacagttgcaaaatgggtatttctcgtgattctcgtcacaaaagatcagccaccggtgctaagcgtgctcaattcagaaagaagagaaagttcgaattaggtagacagccagctaacaccaagattggtgctaagagaattcacactgttagaaccagaggtggtaacaagaagttcagagctttaagaattgaaaccggtaacttctcttgggcttctgaaggtgtttccaagaagactagaatcgttggtgtcgtttaccacccatctaacaacgaattagttagaactaacactttaaccaagtccgccattgttcaaattgatgcaactccatttaagcaatggtacgaaggtcactacggtcaaaccttaggtaagaagaagagctctaaggaagaagaaattgttgctccatccaagaacgctgaaaagaagtgggcttctagagctgctgctgccaagattgaaaccgctgttgcctctcaatttactgctggtagattatacgctgctatctcttctagaccaggtcaatctggtagatgtgatggttacatcttagaaggtgaagaattagctttctacttaagaagattaactgctaagaaataagttaatttctaaagtttaattttaattttaatctatatatttcatgtaccatttcatataacttttatttagttttactaatttaaaatcaaatatacaatatatccattttgatatagctcttttctagtgagagcgggttgtaggttagggttttttgtttttgctggaagttatagaatttttgaatttggagaagaattagtaaatattaaagtgatagtgatatggataagcttttctagtacatgatatatatacatatattataagtaactacgtaaggttctaaagtcagctacgaagtaaagagaatttaattgtgaaaaacagatcgttgcactatgcaaatacacaaaaatgaatgatttttgcaactgataagagaaagatatatcaagagagaaaaatcaagaaatattaaacaaacagaaatgtagtgatagtatacttattagaagttgttataaccgccaaagaaaaaatagatagaaaagaatataatagaaatcagaaaaaataggcaataaagtgagtttctgcattccttaaataattaaggtcagaacaggtctgtgtaaaaagttgttttcatcattaaaatgttctgcaaagagaaagaagagatcattacatagaagataaaaaatcacctttcctctatgatactacactaaatgcttgtgagccttcaaaagccatctagtgtgtttaatgttaatagatcgctgcactcacaagctccttctccctttagaaagaggacgttatatttagagtactatgagtaacttacaccgcggcgagttttaggttgctgggcaagcggtcagcacttgtccttctgtcattgaagaaacatgatgctttttatatgtgttaattagaaaaccacagaaaaaaaattcagaagaaaaaaaacatatttcaacgatgattttcttctctgtttttgatataaaaatattagggtttagagtaggttaaaccaaaacgtcaaaaaaaaaaaaggtaagacaagaggtcattgtatagtgcaatgtttaattgatgatgtgcaaggtttattgaaacccacacatcgagggcaatgattaatatactattctcggatattcctattgctgtaaccgttggactggatcattactcatttgatgttgtcaaaggtcaaatatttaatggaataatagagataattcaaggtttgcacaatattcatttccagcatggtggtgttagatatggatactggattcatcaaggcagtaactattatgttcaatataatggagacacagagagttttgagttgaagattgaagaagatgctactaaatatgaaaatattttggaatcttttaaacaaagaggtacagtagtcacatatcctaagacgcaagatggtgatatgtggacaccattaatacaatatatcaagtgggatcaaattattaaaataacacaaagtaattctcctgttgtgtttgtagattcatcaatgactactcgagaagagaatgaaagtttgaggaatgttttgaaaaatcgtgcattgaaagaaaatgatggtgatccaagatttgaaaacaataatgaaccatacctagaatatacactaattaaattaaaatcaaaggcagcaatccggaagggtcatgaaatggaggattatattgacaagacatattatttcaatgaggttatagtaaaagaatattataatggtagattgaatttatattatagtgaattgcaatttgcatatatgaatactatcttgtttggaaattatggttctagtttgcagtggcattcaatgatagaagttttctgttttgctaaagagatacgaaatgaaaatggcactgataatgatgttgtccatattatcgatgaaatattatcccaacaattgactatgttgcctgaagaatacgttgaaatgttgttaaatgaggccatgtggcataagtgtttattggattcatatcaaggtccaaagctgttaaaaacaagggaaataataaaaaaagaactgccacacctccttagaaactctcaaatcgatcatatagctaataatgaaatggataaaggagaagcggaagattatatacaagaagatgatggaattatgctgcctccaatagacagtgataatgaggaggacgatggacctatggttgtggaacgtcttatatataggtagctaccatgatgtatatactagtaatatttttttgattctgttatattaacattgtgctgaaataactagtttttatctatttcccaagcttatcttcgtaagtattggatattttttgtcctaggattttaatactggcttttttctcttcctccacctcttcccccgttgtattttcctttttagaatgaatttccttacttatctatatttagataaagatgacaataataataacacaacaggtctcaattaaactagtctcaaggattataggtaaacaccagtaagagagaaagaataacatttacggaggaacactgacaccaaacggaaaaacgcagaagcttaatagtggttatttatttctagatgggcttagatcatctgatctgaacacagggagccaagaaactcgaaaaaaacaacggtttttaagggaggagaaaagggaaacagaaaggaaaaaaaacaaaaaaagagagcaatagaagaaattacacggagttctcgaaaaatctcgaaaacaatggaatcttggtgttattttttcctttatctctcgaacaattttggagggatgtatgtattttcctatgaagtcatttattttcaccatgtattttttgattatgttaccattaactattactagcagtagtaagttgatggcgtaaatcttacgaagaaaattacctgttttgtgatatttgagttttttatttgcagtattcaatctctccttgtaagttgagtggtttttttttctttttttattaattaccttacaagaagatataagctaaaaaaaaataaataaaaaaagtaaattactatttctagtattttccagaaagttcacttctgtttcatagggggagaataatagtactctctaatattctatttgttcttccttactttaaagggggagggtgtctttaataagtattatagggaacgttattattagatggaaaaggtaagaagctatgaatgaacactaaagtagtgctaatggtagggtttttgatatatatataaaggcatggatcatatttctcattgacggtcagtccagtatggtccaaagtccttttttctttctcgactagtatcaatcaaataaaatcaaaataacaaaaacacaacatttgttggaaaaaaaaataactaaattaacaaatagattaaaccatatataaaattaaacatgtctaaagctgttggtatcgatttaggtacaacatattcttgtgtcgcacattttgccaatgaccgtgtggaaattattgcaaacgatcaaggtaatagaacaacaccttcatatgtggcattcaccgacaccgagagattgattggtgatgctgcaaagaatcaagctgctatcaatcctcaaaacacagtgtttgatgctaaaagattaattggtagaaaattcgatgatccagaagtggtcaatgatgccaaacattacccattcaaggtggttaataaagatggtaaacctgctgtacaagtggaattcaagggtgaaactaaggttttcacaccagaagaaatctcttctatggttttgacaaagatgaaagaaactgctgaaaacttcttaggtactcaggttaaagatgctgttgttacagttccagcctatttcaatgattctcaaagacaggctactaaagatgctggcactattgcagggttaaacgttttgagaattattaatgaaccaactgctgctgctattgcttatgggttggataagaagggtaaagcagaacataacgttttaattttcgacctgggtggtggtacctttgatgtttctttgttatcaattgatgatggtgtctttgaagttaaagcaactgcaggtgatactcatttaggtggtgaagattttgataatagattggttaatcatttggctgaggagtttaagagaaagaataaaaaagatattacacagaatcaaagatctttaagaagattgagaactgctgcagaaagggctaagagagcattgtcctcttctgctcaaacctctattgaaatcgattcattgtttgagggtattgatttctatacatctatcactagagctagattcgaagagttatgcgctgatttatttagatctacattagaaccggttgaaaaggtgttgagagattctaaattagataaatcacagatagatgaaattgttttggttggtggttctacaagaattccaaaagttcaaaaattggtctctgatttctttaatggcaaagaaccaaacagatctatcaacccagatgaggcagttgcttatggtgctgctgtacaggctgctattttgaccggtgatacatctagtaagacccaagatttattattgctagatgtagccccattatcattaggtattgagacagcaggtggtataatgacaaaattaattccaagaaattctactattccaacaaagaaatcagaaattttctccacatatgctgataatcagccaggtgtcttgattcaagtctttgaaggtgagaggacaagaactaaagataataatttgttaggtaagtttgaattatctggtattccaccagcaccaagaggtgttccacagattgaagtgactttcgatattgatgctaatggtattctaaatgtctctgcactagaaaagggtactggtaagtctaacaaaatcactattacaaatgataagggtagattgtcaaaagaagatattgagagaatggtggcagaagcagagaagttcaaagctgaggatgaaaaggaggcagaacgtgtccaagctaagaatcaattagaatcatacgcattttccctaaagaacacagtcaatgaaaacaatttcaaagaaaaagtgggtgaagatgattccaagaaattggagactgcagcgcaagaaacgattgactggttagatgcttcacaagcagcttctacggaggaatataaggataagcaaaaagaattggaagtaattgccaatccaataatgtccaaattttacgggggcactggtccaatgcctggtgctggcccaatgcctggtgctggttctgggccagctggtgaatcaggaccaactgtggaagaagttgattaagaaagttgtacagggaaatagaaaggtttgttgtttatgaagaaattttactgtttatattcactgaataaattagcagttattaaagttgaagaaaaaagattatacttatttattgttcctttatatatttaattcttatttgttttaattcttgtataaatttatatatgtgaaaatataattttattttatttttacttatgaaagcagacaaaaagacggtaaaatgcctcactacaactctgcttctttttgaaatacgaggcatgtgtatatttgttctatagctgcataaatatgtatatgtatatatgcatagtgggcttcatttatcatttttatatgatgtgaaatgtccttattcggaaaagtcatgacaccattgttttagaatagagatgggaaaaaaagaagataattgagtttgagtaaaatgcgatatatatataaaaagtaaaaatgatgagtatatttggaaggtgattatattcagtaattatagaacaaaggctgttggagtttgagaataatggattgagaagtaggggaaagttttggaaaaccagttgaatatagtcttcattattttatttagagaagaaagctataacaatattggctattttaatttcaagtatggaataatgtcaaattcttttaaccacaatgatttaaaatcaaatttcttaaatgtagaaatttccttaaatttgggattgtttccaagaaccccaaccaaatgtataaagtcttccgatatcgtggatatccaaaatagtgaaaatattgtcaatagtattttacaagacagatcagcgagatcccagaagtatgctagtaatccgtataatatgggttcatcgccattaagttcaaaagatggatctttgtctaaaatcaaaaataagcaaaagacacaaaagacacaaagaatggaagaaagagaaagaaaattgttagaaaatagaggtggcttaaacaaaatggaagaatttgtaatgaaaggagaaaggaaaagagaacttgatgatttggcaagattagctttagaatacgcgattccagaagatattgtagatacatttgaagaagagtgtcgaagtgaagacaatgtggaaccttttcataagaatcgatatagatcgatgtttcaggatcagggaaatcaaccaccattaaaaaaggaaaaaagttgcgataatgacgatgatggtagtgatgatgataatgatctgatcaggtattttgagaataaggaaagatatgaaggagaattggaacaattattatcagaattatcaatgacctaagcatgattatatggaataagtacttattaatgaattttggactgagacgctgtcttgggtagtttcttaatagttattcttatgttattcaaggtatgacattactttgtccgaagaaatcaggtgaattaattgtgatgataaattttcaaacaaaattccaaactaattttctatatgttggaaatatttatgtgttcatattcacatgaacttcagtaatggaagtttggctaattctgtttagttttatatcattttttgtataaagggaatcatatgatacacatttgtactactagctaggtcaaagctaaaattacatatattaagaattgaatgcaactatgtatttgtgcatgtacaaaggtggaatactcataattattaacctgtgttctggcgtaggtgctatcagagaaaaagttattattattaagaacaagaaatactgagcgcctatttaattatcatttcatgtaacatgaaaaaatagtgcaccattgtagtttgttcgaaatatatacatacatagatatatacatgcatagatagataggtttggtgttgatatatgtttgagaagaagtaagtagaaaaactgatattttattatttagctgttcactaaaaggttatagaaacgaaactatatataatggtaagtattcaatataaaaatattgataacaaggttaagaaaaaaaataaaataggtaaagagccatttttatccaagaatgtaaatagaatcagaggaactgaagggattcgaaatgttaaaattgaaaatatgacagggagacagttacaaaataaactgtctttaaaaaaagaaagcgatattttatatgatgatagtggagaaaggttaagcttcaatcagaagtatggacaaacagagggtaatcatgttttttcaactaaattgaatagtattcgcacttcattgtcatcaagaaatttgaaacttttgcaaagaaatattggggaattggaaacagctagtgatatatgttcacattatctttgtagtaatgagaatatgaaaacagtggatttttcaagactatggtttctgtttgagttagaaatgtcagtgaatggtggtattaatctaagaaatgaatgttattataaaaaagtatatgctaagatcgatccaaattggccacaaagcaattgtttaaaagaaaaattaccttcaaaaatatttgaaatgcagctaacgcacattattttacctaaaccaattaatattgggggtgcttactaccatcaaaaaaattccacagatttgtcagatatgtctattttgattgagagtgtaatagaggatgagtcatttttggaaactaccaaacagaaaaaaattccaagtaattatctagcggttagagataagaaaaaagtatttgatacaattaatatcaatgtaacaagcattttaaatgaaaaaagctcccctttaaatgatatagaaaaaaaagctcttaacagaaagtggttccagtaataaaagaatggtgagaagagataataaactttcatattttagaagttaaatattggaattttaggttattttcttctcatagaacataaagttgcgattttctacattgtcttttaactaagttatttattactaataatgggttaaagaacgtttgaataacgtccatctatcacaaaatttaaaaattgttggaattaacaaaaaaaaaaaaaccaattttaacccacacccgctaatacaaactaataatacctaattctatattaaactatacttatgtacatacacacacatatatacatatttctaaattatgatgcatattattttttaactttttcttttacttcagcatcagtagtagcgtgaagtcttaccacatttggataatcaggtctattattcatatgaccttgatgccagtcataactcaaagcatacgcaaatacggtaccatttctgttaaaattcacaacaggtatagatgcttgcattgaagggaatcctcttagtctatgtctatgatttttatcccaaaaatggaatgacccatcaccacctgcagtggcaaaagtaccatatataggatgaaacgcaatactatttactggatatactatagactgtgtctgagtgcctgcagctctgttaggatttgtttgacggtgacatttgaaagaaaacccatttttcttttgttgttcatcatctacatatctaattgcacatcttccttctgttgaaccaatagcataaccgtcaccttcattataacacgccactacccttgtctgccattttaacggtgactgcgttgctttaaatattgtacttggattatttaaatttataataataatatgtttttcagcagtacctactactaataattgtcttttattatcaattgtataaactctctctggcatcattactgtcgctactggttgaggctgccttaaatcccaatatttaatcgtcttatcccatgaacctgtaactaaacattctgtatttgtaggtccacaattcacaaatctaagactctttactggagcatcatgtatccctatttgttgtgattgaccactggttacatcaaatattctcactgcattatcacaaccgcctgaggcaactttagtaccgtctccactccatcttgtcgttaatgcaggccctgaatgctcatattgagaacgtccctgagccacaccattttgaatgtcccaaattctcactttaccatcccatgagctaacagaaaataaataatcatgttgtggagaaaatgcaatgtctgaaatcgagtcatcagcagggttttgtattatgatatcattagctagatccttttcggtagtcattgttgccgataccgtattattatttgatgtactaaaaaatgacatttagaaaataatattcactcttgtatgattaggcaatgtatatttaaactctcagtgagtacatgcaataacacccaataatatatcttactggaactcacccctaatcaataagaggatagaaataagtactctagaacctcttcctgcttataacttatctcgaagttatcgaatcttttaacttttgatcttctttagctttacttttttcacttttcaagagcttaaagaaaatacaaaaaaaaacccggatatcaggatatttagtgtacaaaccgttaaaaattacagaaaaaataggaatgaatctatataacattaatacccatttaaatttaatatgtctatcttatagatccactcaatcaaataggataacttcttgtcaaacattcacatatacaatttatatatcataatatttagtaaacattagaagcagaaaatgatacaaacaggttatgaaccattcaaaataaccagaaatgagtgttaaattttagttgtctaaaggccaaccaaagcttgaacaatctaattttattgccagtctataaaattaaagtctatatctccaccttctacattatttggagatgccccttttttattgctagtatcattttcatggcctcctccaatattaaggttacctgaaagtatggaaaaagattcaacagaattaccattaggtattatagcgtttaaactggaatgatcagtagtaggagcttccaaatttgaaaaattaaagtctacaaaatcatcagtatcatttttaaatgaggactgtaatatatctgggttcattgaactagctagtgaagtatctttaacttggttcttaccgttttcttcaaaaatctcttctgtgtctgataatgcgcccatttttataatggttttatctctctcatttttttcacttgaattctggtgtttgaaaaccctagatttctcatctttatctaacactgcttcactaatgtcttgattactagtctttgattttttgggctttcttcctcttttacgagaggattctgagtgtttttcgttcttgttcatttcttttctttttctcgaatgttgaataaactttcctttactatctttacctggctcttctgttaaaaattggttgttttttatatcaataataccaagagatgaatcagatgaccttctttttatagatgcacaatcaatattatcaacttttttatcctgatgaacccatttattttgtgaaaaagacgtattagagaaaccattttcatgtaccattgatgtgtttttaatgctgctcctatgcgatttatgactactatctttatccttattagtgtaattagtatcagcagaaaacgaagattgcactgtgttaatattagagttactagaattatttggtaggtcaccagtccttggagaaacacccccttgttgaggcgtgaatgttaaattttctgatacataggaaggtactgcacttgtattgaagccgttatttcctatagattctggacttaggacagtatctgtatttagaatgcttgagtttatgtacttcatattgttattatttgacattataccattgctttgaaagtctatttttgattcacttttactcttgtttaatcctgatgtctttgaagtagttgctatggaagaaccaactgacggagtaaatgatttcatacaagtttttttctttgtatcgtacaatgatggcttcttgttttttatcctcgattttttagttttattattctgtggagaggtaagatcattatccaaaatagacatattgttagtgtcccctgttggaagattagaattgttattcaaggtagcataatcattactcactgattcaaaattattttccgtattatcttcaccggtatcttgtatactgtattgcctattctggttattcacttttttatcattaagaggatttttataattgttataagcatcaagttgatcttgtttagagaattttgatacagcagactttgtatcccatttatcactactaccacctgcattataatagtcgttataatcagtaacagagttgtaaaagccttccatagacttcattgggttattataaacttgtgctgatctccattgagatatgttgtttacattttcgcatggtgatgcctgttgaaatgtggaactatttatttgattttgattctgagcttgaccaaagtataacacagaagattgttgctgttgttgctgattgggaatccttttctgatattgttgctgttgctgtctttgttgttcaatttgtctctgaagttgtaattgaacctgcatttgcatttgttgctgttgaacctgttgaacctgttgaagaggtaattggacatatttagcttgttggtctatcggtaatttttgtggaatagtatttccattacttaaattatcaaaatcaggctttatttgcttttggttcatattttgattattattcctactcgtatttccattactgttataattgctattagtgcttttattatcataatcattatttttctttgttctattaaactcaaaatttggtatattattattactattagtattatgatacttggaaatcaaaggtaacaaggataaaggatcccttgagtgctcgccatattcacctctttgttctgctaaattctgtaattttgcggcatataacatctgggccttatatgaattatctcgccttctttgatttgatacaatttgataatacttattagccacttcagtaccaccacgttttgttattgtattaaataaatcccaaaaaatatgccaccattcaattaaaaatccttttgaagtattagaatattcgaattgtgtaatatttttggaatcattcaattttgcttcttgcttaaaaatagttgctgatttgttaaacttggatttttgtaaaaaatcaaaaatatagttatttaaagtttcctttgatttttctaactctgtaaacctggtgttgatatttatatttgtactttcaatattgttgttattccaatgggtacttttgttattaaagtcaatggagctactattattactgttactgttaccatgaatatgatgcattgtaccatacctccgacttttcataaaattaacttgaggttgtctatgaggaacagattgttgaggattgtataaggcatgttgttgttgttgctgcgaaaaaagatcgtgcaggaattgtatcctgctttttttttctgctcagaggaagaagatgtaggggcaactgaaataggatgagaatatgaagaagagggggacattgaagaaggagcaggagcaggagcaaaggaagaattaggtataggaggtcctgcaggtataggctgagtcattatccactgttgcatggttggatcaaatggtcgcccttgttgtatatgattcatatacaaaggttgcgactgtgtttgactctgaggtggatactgctgctgttgcggttgcggttgctgttgttgttggccttgctttagaaacatagaacctgcgtattgttgtggattaggaacgtttgttggtatgctagatacaggatttaatgtatagtttggagaatatgcatttactaaatgttgctgttgtaattgtgattgttgggtgggtatctgttgttgttgttgtcgtgatgatggattcatataattttgtctagatacaggaacaaatacagcaggttgctgaggaaaagtattggttgcaggtgtggttactgatggatatactggttgctgagaaaacattggttgcggctgtggttgctgtggttgttgcggtatttgttgttgttgttgttgttgcggtatttgttgttgttgttgttgttgcaagggaaacataccttcacttggcgtaaattgtccttgataaggaatatcatttgttattatatattgttgtgatccatttaaaacagctggtgaaccataagagtttacagacataatcaaaaattaattgtgatattaacttaacgtaattaaatgatgaaatgaaataatgatggtaataaaattgaaaaatataatctaacctctatattgatggaatatgcaaaaaaatacaattattttttaaaaaaaaagaaaacaaaatatcaatacaattaatacaaatatatctttgatactaactattacaacaaaacaaatgaatcttaattaaagtgcagagtaaaatcaatagaaaatgaaacaattattgtgcatacacatgcacacggacacgtatagatatgcgtgttaaagttgtagcctatgtctcaatattttaagtaattattggtcaacttaattgtctgcttccctccacccttctaacagtctgcttgccattagttaagaccaaagtttaatgcagtctaataacaactacttttgacagatactgtcgttattggaataatcttcaaattttcttccttatttaatttgaattcggatccaaatcttcaaatgacgaaaaaaaaaaaaaaagcaaacaaacaaacaaacacaaagttatcacgtgatcaaggtttcgtacaacaaaaaaaacaaggaaaatcaagacaggcgatgaaggtatgggtgtatcactaggaaattaaaaagtttaacggatgtcacaaaaaatcaaagaaagaacaacttgactatttgaagttgtacaaggataagattaggcttacaaaatatgcttctgatagtttcaacaaacaatgatgcttggatcaatagtgaaattcttatattttattgacaaaattatttctatttttttttttgggtattttttgacaaacaattcatagtatacattaaatgatctacttacgtatatgaacgtgaggaagtgataaataaagaatgagcttgtgtttatattttatatattaaatatattcaaagagatcaaagtgcgaaacactgtaaaaaagctatgctgtattagccacatctctatctatacatctaagcaattaatggagctaaaacagggttggaggctacaacaccgtcatagttagagttcaagaatttcaataattcaataactcttaatttcatttcttcagtctggaattgttttaatctttccatgttttcttctctacccaatgtagattcttgttctaatttaattctttcactttctttagtgaaaatggcagcaaaaatttcgactatttttggtgtttctttagtaataatagagttgttatcttggtataacttcataatcaattcaaagattggagtatattcttcaaaacctgtttggaatggtaaatgagataaaatagctggaatggtttgatctaaaggaactaaattttcatgttttaaaaccattcttgcaacacacccacaaacattagaaaaggctctatcaatagtttctctggtagcctcatcgtcctccaatgaaagtgctttttggtctgctgtgtgtagaatttgataaagagctttcaatattggttcataaacactagaaatatcaaaggatgcatattgacataacaatccaacaccataagcagcattacctctaacttctaaggacttatcagtagtcaatctaatcaccaaagcctctagcatttcttgaataaatggattttgttctttcataccaagagctaactcagaaactgcaccaacaactgatgacctcttgtttttagatttggattggaataaaccaagaacagttggtttcataccttcaaacactttagcaaaatcaccagctaaagcatgagataaactgactaaaacttctaaagcaacatcttgtaaggtagcttcagtttctgatgcatccatatcttcatcttttggaatatcgtcttctaaatcaatagtttgacaggcatgagtaccctttaaaacacttgtgacttgaaccaacaaagtttctaaagaagaagaatcaccattatccatgataataattggaccgaatttcttaatcatgttagcaaagtcttctaatatagtaataatcatggtggtttcaaattcttcaaccaaattttggatagacacttctctggcattcttgataaccattaacacggtttcatcaacataagaaccagctggtaagccttttggatatgattcttctacaattttagaagctaataaaacagctttaacaacattccagatagtgttcaatgcagtttctcttaaaccataagattcatcaacttgcttgttcaaaacttctaaactcttttcaacatatggtaagaaactttccttggtaccaatagctaattcagataaagcagcagcagcaacttccttttcataagaaataccagtattgacggtaaatttactttgtaggtcttcttctgcaccactttcagcaagagcagctagctcttcttcatcaccatcaaagttgaattgatattcttctaattctaaagttttaaaaatttctggtaaaatggttggcaagaaggtagcgaaattttcaccataaactttagataagttagcaatgaacgcataacctgattctcttaatctagcagaatctgttttgatagcttcataggcagaattaactaatggttcagcaaattcagcaaatgcttcagatctaacggctctggccatagttgaaatattctcaaatgtcatagctcttaattcaatatcgtcatcactcataccttcaatttgactacaattttgaataaattgttccaaatattgaacactcgttttgaagtatggaataaatgcagtaccggatgcaaatgcagcagaaccaatggcagagacaacggcacatctcaatttagatgactgattggattctaacatatggaataacttgttcattaatggttctaagtagtcagaaatagcttcgtaggcaatgaactctagtaaaccatctaatgcaacagtggcatagtggtagatgacaaaaaacttagcagaatcaattatagagatgattaatggtaagtagtcggcataaaacttagctacttcatcttgtaactcaacagtcatttgatgaacacattttaaagctgctaattgaacaattggttcagcatcctttaatccagtaattgtagccggaataatcttatcgaattgagataaaatataatctggagaaccaccaacagcaacagagatagccaataaaatagctcttctttcaaatggattagatgattgtaacatagcaggaatatgttcacaaataacagctgcaacctgagatggtggcaattcagcagaagcaaaggctattaatctaatggcgactaaagaaggagtgttttcttcattttcaccagcttcgtcttcgttgtttaattcgtcgtcgacatcaatttcactggcagcaacttttaaggcagttaaagtgatttctggacctaatttaccttgaatgatctttgattttctataagataaggcagaaatgacaaattgaatgccaaagactctgacctcttcatcaatttggctattaagggagatttgtaaagttaattttattaaatcaatgatggcattaccagttaactgagagtctaacaataagaaatcatttaaacaattaaaaatcaatttagcatttgtagcatcatcagccttaataacggcatccaaaacattgacaatagatggaattaaaccagcaaacttagcagcttgatttggatcaatgttttcttgttcttcaattaaagcagagacattatttaaggcttgtgcggatagagatctagtttctaaagaagtggtatcattaattgtttgagcaaataagtttaatagatcgtcaatatacacagtcaatgcagtgttaaaatcttctaataaggataataaaatgaaaacagcagtctgtctattttgactattatcaccagcagcagtttgaattaaacttggaaccaaatctggccatttgttagattctaattcttgattaccaatagctgcaatcacacgagcattagaatgacgaataatctcttttggttcagtgaaagcggtttgtaataaagacgatttaatttgagtttttgtagtttcatctaaaccatcccaatgttttgaaaccaattttctagtttcaacacctgctaattgttttaaggaatcgttagggttattttgaagaatatgaattaatgctggcaaagtttgtggttggctataaaattgggtttgtaagactttagtagcctcttttaaccctgctgagtttggctgaacaatagcattcaaagcttgctcaagttggctcaaaaactgttggtccatcttgagaaattgtttttattaaacttactagttttatctcttggttataatggattattgaattaaacaattcacaaatggaaacaatgatgctatgatcgtttctgtttcttttggatataaattcagcaaacttatgtatacgaaaaagtaaggttatactaacaatagcttgcaaatctgtattctgtaacaaatttgaatacggagaagatgattgatttaaataaacaaggaattatgaaattattaacttgaaaaaaaaaatttttttattaaaaatcatctcatcgcgacgtttctttttatttcgttttttaaataaacaaacaaaaatattataaagaaaaaaagaaaagaacacgcaaaaaaaaaaaaaaaaaaaaaaaagagaaacaaacattaaaagcgcctaactattaacttccttgcttagaaaagttgattattgtaaatatttgttgaagaaccataaaagcaactgaagtgatgtatctaatgtcctgcttagaaaacaaatatagaaaataacaatacctcctttaaggaaaaattatcattttatcttgcaaaattacctactaaaaaattttttttcaatgtagcacgctcaattctcatctactttagtggttatagaacaaatcttgaactgtatattcttaagttgtttttaggatggtattatatattaaaatctttcttgtgcctagtttgtatattgctcccttcttaaatatattctctttatgtttagaaacatcaattttcctccaataaaaaaactatttcgattaaatggtatttttacataacacaaataaaaaattctacaacttgaaataaggctctctttaacaataaaaccacatagtgtataatttttcatgtccagaagatgaaactactaactatgagtattgtttagtatcttactatatatgttgacgcaaggcttcggaatcaaaaattctagtagagtccattttagattaatataataagataatgtaacttacaataggatattggtggtattataagttttattgttatttatagtaggaaattagtgatactataaattgttattgtattgcttggtctttttctttctacataactaatatacaagatacgatattatacagtatactcattttatcttcgaatcttctttaatataaattttcataacttttaatcacttggtacggtgaatttagattatcaaacagaattctaatcatatttcaacaatatatttgtctattccaaacatcatcaatatttgatttttctttcttgataggttagttaaagataccgcgaaaataaaaaataataatattttttagtgctacctgttatgtgaaagcttttaataaagatattttcgactaaatggtattttcaatataaactttcatatcataaatttactattacttgtaatttaaagaagcattataattgaagcatagattctgtttttttcaacaataagtttggacataaacaatcttatatggaagaaaaaaatcgatatcttgttgaccttaaaattaataacttaataacttgtcacgaaaattaaatgtataaaatttcataaaataattataggttccttacttcataaaaaaaaaataaataaataactatcaattcttcaatgcacaatcaaaataactttgactcagtgttttgaataagaaaaaaaaatcataattataattgtctattatcactaaaactgtattcattataaaatactattctcttgaaatcctttgttatatttgatagtaactctcttggtaactgcaaaacgaaaaacgctttttctagtcacttatagattgacatactctcttgaacctattactatcttaactgttaaaaaatcctttgtaattatcacaactgaccttataacagtatttctgaactacgaatgtacttaaattgatttttttatgatttaatgggcggctaaaattcttgtaagttccaaatataaattcaataaataaaacagcaagtagggtttcagacaaaccctaatatcttattcttttttcaacgtttagtttttttttttcgaatacattgaaattcgtagtcaatgatattattagcaaatccttattttttataaatctcattctttacgagaaattacgttttaaatgtcttttttttatttttttttgtcttcttaatgaaatcattaattactgtctgttttccaattcgaaggatggaaaaataatgaattgtaaggcaggtagattaaatgaatgtgtcgatcttgcattaaagagtggtcttattactcttgcaataattagaaacgtagtagttattatcagtaattacaaaacataaatgattaggaaaaaagtgtgttttcaataaataaaggggaaaaacgtacctagggtaaagacaaaattccaaactatatatatacacatatatatatatatagataaatagagagagagcgagagagccatgttaccattatacctattaacaaatgctagaggacaacaattaagtgttgaattgaagagtggtgaaattgtagaaggtgtgttaaccaatgttgacaattggatgaatctaactctgtctaatgtcaaggaatatagaacctcattgttagttgatggatctagtactgaccaaactgtaaaagaagacgtggagattcttactatgaaagaaatctacttgaagggtatctatattaaatatattaagttacaagataatattatagataacttaaaacaacagatacataacaaccaacataatagggattcaaacaatagagattctagtggtaataggaattatcatagaggtggaaacagatataacagagatgctagacattatgggggacaatatcaaggaagcaaaaaacattataagagcgatatgaatagaagaaattataatcaaaataataatagcagcaacaacagtcatagtaatactaatattaatggaagtggccgtcaatatcataatcaaatacaaccaaatgattctattccacaacctaatattaatggtataggtggatatgtccaatatcatggtatagatattaatacaaataacaacaaaaatattgattcagatcgtacaatagaattctaaagtgcaagctgattttttaaatccacatgtgtagttaattatatatacatacattaaagaaaatagaaaataatgtaaaggcaataaatatagatattgtagttgttctacttctcttgttacaatatagtaaagattgattttattcgaagtatattctagctattactaattatacatgcagttttaggtatattaattattgtatatcataaatattacatatatatatatatattataaatatagagagtcatggatattgtataagagaagtttatagtgtaactacttagtgttcttactcatctttttcgtggctatgcttattttgttttaataatgcacacaatttaaagaatttgtaatatgtatcattctatcttttattccttcagttagagtggtacgatggaaaagaaagacattcctttaaaatgaaaaattatttattatcattattattatcattattattattagtgtttataacgaagtctgaaaacatgcttaacaaatgttaaggttgccacataacctagagaacccatggctaacccacacaaagtgttaaataggagactatagcaaacggaaaagaaaattgacgtaaatccacgaatatttaaaaccttaaagacataatacaatgaataaaattccatataccaagcacatgaacttgataattggaaagatttccatctccaggtgtttgcataattttctgtcgatactgtcatcattagatatgagcttataattgcaatctcacatataactaaacataacaaaatgatattggctaataaaaacccataaaagaaataaaaagtcgtcttttctagccaaactgatttataaacatattgtaattcgacatagatgataaaaaatgggaagacaccacataggagaatgacaataacagtgaatgaatctaatgccagtcttttaacgttaagtataagttttcttttgatattctttaggagattgttagttgaagacttcaaatgaattggattattatacaaggttttttttacatcaaatggagacagtttaattgaatcacttcttaatcttgtgtactcttttgttctattcctttgggcgaagataccaccaaaataacttaatggaatacaagcgataaaatataaagagatcagtttcacaatggtgccaaatggcaatgcattggtagaatcatgtgcccaaataatgctattcagacagattgtaatgatcataacaagtccgggcagcagggaaccacaaacaatggggaacatagttgtatttacgataatattttttaaagaaccccgtctggttactaatttattattttcaatggctaaagatgtgccaacataagatgccataaatgcgccaagtatgaaaaagaatacggccatggataatacggtgtgtctgatattatgtaatttgtttaatgaacaggaaatagttaaagatccgataattgtgaagaggaattgaacacccattgatactaaaaagatgaaaatatgaggtaaaggtgatctatcattatgataccaacttcttgctattacaaagattgaatttttccttttcatttgcacatccttttgatgggaattatctattaatgaaatagattcgttatagttttcatctaaaatatctttatcatttttattgattttgataaatattaatgacacgataaatgtcattaagaaggcgataccaattgagttggccagacttatccaatggaattttgtagaaacattattagatagttcaccattttggaaaaacagatcatatctatgattccaatctatatcaaattcttctctccaataaacagaataagtgaagggaatgtaagtcagttcatttggatccgtagggacaataacctcgtattgttcataatcctttgaagcgccaggacagtgataatctgagacagatttaggatagacttcaaacccaacaatcgtaaaattataatcgtctatagcatggaatcttataactaacatcaaatgattattaagataaattttgccagtgtctttatctacaaaacctagtgggaaacctgatgcataatattttttatgatcagtagtcgatataaaggtagtggcagccggcaaatcatcatcaatgagccattgaaccacataacctttctgtattaaatcttttaatgtctgcataccatcctttgttgtctttctcgcacaaagtgcttcacagtcattatcttcgttgaagactaatttatagtcactctgccatttacgatcgcccttaataatttcatttagtgataaatgtaaaggtttcttatacatggtgggaggacaggtgaaaggtaaatcataatatgcataaggtagttgcgttacatcagattcgactttattgacaataatttcaactggatctccgcttttgtaaattgtcggcgttaaccaaccatcatcacttgataaaaccaaagcaaatagagttcgaagtagtccgagagctattgaacctagtattaaaaaagtgtatgaaaacctcatttattacttaacctaattatttttattcaattatattcctacagttactgcaattaatgtagttgtaattaggacaggaattgttataatctatttaaatataatataatttaggtcacaaataaaaagaagtagaaatgatatttatagtttgtttgtctaattcttttatactgtgaaaaaaaataaaaaaaataataggaagaaataaaagggaaaaagaaaattaccgctgtacttaactagggcccgaattattgttagttgtataattaaagattattgcttgtaataattagatcttgttttgtttactttaaagctaatctaaaaacaaataaaaaaaggaagaaaaagaaaattcgcagatcctaaaaatctgtcgtgtttttttgtaatctacatagaaaaaaaaaaagatgaaacaaaagaaaaggaaaaaaaaaaaaacaagaaaaatgaaggcgttatatagaacaaaactcatcacgatcaatcattctacatgcatataaatccatttaaggactgtttttctcaccaaatataaatatttcatcaaatagatgattcagtatcgtatatataagaaatagttttctatccttgttctctttttcaattggtatcttggaaacacatcattcactgtctgtatcacaaatatatatgcatacactttttcaaaccgtcaaaaatattcgtttctagaacaaacaaaaaagagccgtcttttcttattttatttactttttatttttcgcttttggtctgttcggctgttgacggattttgcccttaagatccgatcaccttagctctccaaatgttgaatgggagagaaagaacaattaagagactagagttatttatcttaattaattagagaacttatagaaaaggctttctgatataatatatatagtgtatatattgagtatttctccctatatatatatatatatgcatgtatatttagatcagcttctgtttcttcccccttttttttgtttgatatatatttttgttatttgttgattgattgattaattgattttcttttacaaaacaccgcctgttaaataatcttcgtttgatttcttggtttgactagatgtatttcttgggctattgtttttatgcccaataccaggggatagcatacccgatgctaataaatatgggctagcgaacccattactatttgaaccgacacttgtgttgcctgtagtactagttctctgtaaatttgaaaacaccccatcttctatagagtcattgttattattactattatgattatgattatgattatctgttgttgaacggtttttatattctaacctttcttcggatttctcaatagataatgatgatccacctatagtagcattgtgttgctcttcccataatcttcttccctcatcctcgtcctcttctattccgctattctttgtgaaatcttcagaactattcccaccgttatttttcttatttattaatctcttcttttctctggcttctgtctctcttctagcttgtgctaacatctccttggctttatttaatgatattgtaggcgtactgtatgaactaattactggaacagaggtatctatgtcaattgtagtcttcagtaaattagccatccagcctctcatttcttctttagtatctacggcaaaatagtgtacacgaggttctgtaaatgttaaccctttccttgaccctggttgtggtggtaataatttgaaacaataacgccctttccctgcggtagccgcaaataatgccacaaatttatcgtcatctcttgctggaacaactctatacccggtaatatcaattaatccacgttcctttgtatctgctgtgcttgtaaaatatgataaccgagtaccctctaagataaagaaccttgttcgccatgtactcatagtcccacttcccttcttactcatccaacctgaataatcagccgtctttaatgcatctcttacagagatgtctcttaacccctccataaaagctgttgtgttttgtttttttaaaggtgctcttgttgtcatcgcacgtaaagtctttggtttcatgacttcacttacagatcttttgtttttatcatcctccaatatcttcttattcatatcaataggtcttgtcgattgatccttagcgcttactgatctaaccttatcctttttcacaggtgaagtaattaataacttggaattctttgtgtctggtgtagtccctgtggcgttctcagtaaattcttgtctaatagaactagttgtaaaaccatccttttgctttatactaaaagaagtactctttctgatggaattatcatttgacgctttctctcccttaccaaaatatgacaataaagaagaatttcttttcactttattacctgaattattagtagtcgaatcctccatttgaagatatttattttcggtatcttctgtcattgtactttgcgctggaggttgactaattgaaactgatgatgctggcgattcatatatactggaagaaggtctatctgagtcaacacttctttgatcaacttctttattggatgatggaacagtcaaattttcgtttttcggtacctgtaaattattgataacttgactatcgtgtgatccttccttatcttccgcggttggtctgataatcgagtctttcttattttgataaagtgatgatggtgaataagtcaatttactactggtatttggtgtgtaattcttccttgtatttggcattggggacttcggaggttgtacaggacttggatatgaaggaggtttgggtgctcttctaggagatgtaaatagatcttcattctctaaatcttcagtaattggcaatattatagtcccatctcgaatatccttagtcaactgatcattgagcatcaaagagataggtctgttattgtccaagttattgttatggttactatttttctttgatagaacaggtttgtctgattttgtagtacttaattccaccatggatcgagaaattcgactattatctttatcaacatgtgctggtggcattaactctttggatattggaactgatccttttaacatattagatttttttggcttccttgccgctgatgtagcattcagattcttttttaatgcttcaatttccttattcatttcaaatcgtgttccaaaggaattaatatctagttcttttagatgtgctagttccaattctaataaaatagcacctgatattttatgtcttttaaaacgtgatgcagattcgacatcaaagccacagtttataaaatagttagatacctcctcgggactccaattataaacattttttggatccagatatttaccttttacacgaatatcttttacattttcataactctgagatttaccagaaaattctgtctcagctctttgtgattgatcaactagatctaggtcttctgtttcagtgatcactgtatcttctgcaatattataaccaactggttcttttgtactagatgtcactgtatttaatgattctgtaggctcatgagtcagctcttcaattgctttgtcgatatcactcatcgtacttttcatagatatatttctagatagagtatatttatccatagtattatttgtattcgaagcatttttagtttctacaccagtagtcttgtctgcctcttggttattttggtatttcgaaaatggggctacagatgctgtttgcaattctaatggtgttggtatagtgctattagacccattttgtgaggctaaataaccattgttcctattgttactgttattagatggttctgggttttctacaccaaggggcatatttaatctttttacagatttcgccctcattaacgttggttttttttcagcacttattacttgagtaaagacaactggatatagcccttcttcttgagttcttaaatttctaccaaaataccatccatcattatactcttcatcatcagtgatgacttgaattttatcaccaggtttcatatttagttcatcttccattctttttgaatattcattaatacatatatagataggaaaaatcctaggagtatctggacttatggtattgttttcattaatattatgttgagaggactcagagtgtacacttgtgtcaatatctgacaatattgctgataatttattactcattgatagaatattatctcttatagatagactttcgtagtaaatccaatataaagtatttctttttgcagtgctgcctttttgtatgttagtaaatagtttgatttatttatttgtataagtaactatcttattattgtttccgccttcttttttgagaagtgtttaaaagtgtgataaatagaatagctgtttaaaaaacagaatttatgtcttttcggtgacactagttaacgaaagaatttattgactttttattattatatatagacgatagtgaaagcaaataagtcttgatattcttaatcatgtttattatagtaaaaatatacatttctacatgatcgacctttttttcatctcattttttaattacttttaaatttttcaaagaaaaatatcaaatatcatccctttcactgaaaaagagaagaaaaagtacacactactggaaaatcagacaaaaatgctgaaattgaacgacgctatgaggatcaataggatgatccagacagaatatatataggtatatatatgatagaccatcaactatatgagtaaaaatagtgctgaaaattaataaaatacagaataaaatagaaataagaatataaatacatttacacagatatatatatcactgaacaagtgtggtaatagtttattatcggatttcttgtctcaaagggcttctacatattgcaaatgaccgacaaacacaatctttgtgtgatttcattgatgtagaataatttatcccatcaatagcacaggcttcatgccttttatcaacatcccccgcgaaaaagccaaatccaactgtattattagtttcatcaatattttgcttcattgaacgaatttttttttgtctttgaaaaaacaaagagacttgactcttttgaagaatacttttcttttttctgtccttattatttcttttaccctttgattttctcttgatactcatctcaacgctatctttctttttaatagcagcaagatgactatgaatagctgttaacgatatatttggacttaattttgttgtatcatataacttggagtaaaagcgtttatcatacagatcattaactgtatcggtgtcgtcactacaatcaatactttcatttttagtagatcgattctcaaacaatatctctaatggttcaagtgataacgaagagaccatagatgtagacgacttgtcagataaaatgttatctaaacggatttcccatatgttatcatagtacgttgttatatttctcgaaaaagggtttatatctaatcgcattgattcaatatagcagttactcaatgacattgatgattctatcacgataataattgtattgaaaaatcaatttctcttttatttttttattacttaccctatatattttccctggtttattcgaaaaaaaaaatcactatacaagttcgtgatatcttataagaaattgtggtaaatatagtagtatactggtattaacataattttcctttatttttaattatatttgatcttcatataacttgttaaaactgtatttgatatttgaaacatgaaaaaaaaaacattgatattattcacattattaattgaagcaataacacctttttagaattataatgaaacagtgtaaagtagcaatgaaaaatgaaaagataaatctaatattacaacagttttgaaacattgttaaaagcaatggttaaagagaagtatgatgtgcctcttattactattttctatttcgatatttataaacttttgatttatacttaaaaaatgatttatttaattaaataataaaatatccttaagtaatataggataaaaaattaaaatttgattattgattacatttactaaccttaattaaaagatgatctatgatcattatttcaaaattaagaaaaaattgtatatttcctattatcaattttttgtaatattatttatcgtgaatatcatttattttcctcttttgatgtttggatttgtttacgtttcattcttagtagtacaacagtccttaaatcgactttagacctgcacaatgcacatagtcctaaataactattttgtaaatttcgacttggatttgaattattgaccatttgaaacagacaatcacaacaaaatacatgaccacattgtgttattaatgccctttctggtggttcaaaacatattgggcatttatactctctaatcggcttgtatgattcagggggttttctggattttttcagttctagatcatcttcttcatcatctaaaatttccactacctgttgttcttcaacatctaagtctattgtggtaatattattattatcattagtaacagtatgtttatttgtagatggtggttcttgagcagcaattattgtcagattatcatcctgatggctattggattctatacgaggagttgatggtgtaatagtatttattggtgtatcacttgaaatacgatgtaatacagaatcttgtaaaatagaattagaagtttggttagttctattttcataatgtgaattttccttatccaacatttccagtaaattagaatctgaactcatcccagtaaaatctgtagacgcctcgtcatcattttctatatttaaagcctcttcatttcctaatgtgatacttggatcgcttgtgtcttcagtaacaaaaagatttgtttgcacgttggacatatccaaattgaccccagctattttcacttattgtttgattttatgttgtttttcctacaatcatcaatgtcctgtaggctgatagtgaacgttcaattactaaatagtgttcataaaaacgagttttaacttgtctgttaaagatttacgattataggtacattgatatattctctctttacttggcacatgtttattagattaatacgcaagatgtataattgatgggcataatgatcttgtaatttttggtttggttcagatcacttatcttatgtatttttgcttttctttcttttgtttcattttttttttttttattttccccatttattcaagcttgcgatgttcaaatgtcccacagtaagattaaaagcaaatgaaattttataaacgatttcgagtcttcccctttgtataaaccacacattctccttgactgtctaagtatgaacacccatacatttttgacaaataatttttttttcttgttttttttgtctacaatataaggtaagtataatctcttcctgtatttcctgatttggcaaatatctttcttttctagaaacgaacttttgaaaagcaggaaaaacagcaaagtgctgtagatttggtgttgtgggccgttgaagggtaggatgagcctttctctgttctacagttgtaatccctagttgcatcacctgttcgtttcgatattcggtcgaaagtaaatgaattcttgggggtaaagcatgattagaacgggcagatatgtttaaccttggaacgcaatggttattgttgaacaggtgtttaatacgcaagaagggggggaggactcagtactgttaattgcttcctgtaggaaggaccagttgtttctctcgggttatgtcatcgaatggtttctaccattgctctctttctaccttcccttctgtcttttgttcagtagaaccttctttgttggaccaaagttagtttgtctcttgctaagaggcttccttcaggtttctgttctttctggtctttccagtttttctagtctttctagtcttaggcttcttaccgcaaggattgggatccaattgagcagttgaggagagaaactaacctgttaccaacgatgctttcattttcgtaacaccaactaactagtaacggtaatgtgacaagcaacaggtcaatctcatcagtaggtagattggtctacaggtattgtatgggggcgttgtgagtttatacgtctggttttgacctttctactaagcaaggaacataataccgtttttgtacttcatgctgttgaatcaaggttatatgaaaagcagtattaaggagtcttgacgtgtagtacattctcccgaaccactcgtaaagagttcttaacagacccaaacaactaaatacacggtaacaatgtcaggtaacggtgctcaaggtactaaatttagaatttctgtatgttaaatttgaatacacttttattatatgagaagaatggaattatttgagacagtaagctaggagaaaatgtgaaaatagaataagagaattctttgatgttggggttatgtaagaaaaatattagtagtagtataacaagcacagtgaatattggtttttacaaaatgcaatttgttattgattcgtattaatttgttgatagcaaatatggagtgatagactaagaaattaaactcagaatttttgtactatttttttttagatcagagtaagatgatacgtaattactattcaaaagagtggaaagaaaggattgtgtcaagaaaatttacattctgatgataagtatgattgatagagactagattactaacaaatgataacatattgtaatatttcatagtatatttggaatatttcatgcaaaatttttaatctgtattcttatttttaaatagttaggtttaccaactggtgctatcatgaactgtgctgataacagtggtgccagaaacttatacatcttagctgttaagggttctggttccagattaaacagattaccagctgcctccttaggtgatatggttatggccactgttaagaagggtaagccagaattaagaaagaaggttatgccagccattgttgtccgtcaagccaagtcttggagaagaaaggatggtgtttacttatattttgaagacaatgctggtgttatcgccaatccaaagggtgaaatgaagggttctgctatcactggtccagttggtaaggaatgtgccgacttatggccaagagttgcttctaactccggtgttgttgtttaagtttattaataattgaatacaaatattaatattacatcatattttctatatatatatatatatattaaaaaaagaatctcataatcatttagttcaaatcaaggagaaatttctttgttatcttaattgtaatataagtgaatttattattgtatttggtatgtatacatatctacaggtgaggcatacaaggtttctattatctcagtattttgtgaggcggttagagtttgataacaaaagaaacagaattgttttattttggattagatactaaaaactatctataaatgtcaacttatatatattatctatttacatcttaattaatcaattatttattttttcacttatcagcagcatcaattaattcaacataattacttggtataatgccaatggtgccatctgctcttctagccttccaccatctaccttctatatctgttacttttaagatttcaccttggttaaacgatatttcatattggtcgttggggtctgcctcataggaaaataatgctcgggccatgtatgggaaactatcttcttcacctagttcactgtataatcctactgtacctgtcatcatagtgtcgccattcgtactagacataaatgtatcaccaagaccactattatggttcttatgtatattacttatatttgtagtagtgtcaatatccttcttataatctgtttgatgggtgtatccaggctcagtgttttcaaatccagccaatgcattagaagacatataactatgttgtggcacattttcagttgaattactgttattgtagttttgataactcgttgtgcttgcaaatctcgtattacgattgttatagtcatgcatgttattattttctagattatgtgttgccattctacttgatctacgacgtgctctaagtttcgaatgttctaaaggtgacggtttgataccgttcaaactgaaactatctatccatctgttgactggagatgcattgtcaccaccaaaataaaatatccagatgaaattgacaatagataataatatgacccccgcagaggctgcagcttttctagaaccgaggccatatatcaaatttgtagcactgtttgtattataaacaaaacaaatagaaatgcatccaacaaggaaagatctgtaatagtctataagatcaaatgcataaaataaaattaaagcaactatgataacgaattgaaatgctatcccccaccacgtgaatcgaggaaacgtttcattattggaagcagaagcagctgacccagcaagggtaataatccatgatataaacgcaattgataatgtggccaaagcaaatggatcccccaagagattttttatatcaaacatatgattgaaccctgctcttgttctgataggtctttttggtagatccatgattatagctatataagtaatgcttaagaataggattggataggtaaacaatgatatgacgttggcaagaattggtgatatgtttgctgttatctaccagtgggggtaaaagaccacatatatatttacaaatgtgtttgtttaattatgtaatcgcttactatcttgaaattctatattgatgatgaaaaaaccttctttaaacgctaaagatgtttagatttttctaaattagttaaactgtaaacaacttaccaacaacttataaacgtcagtttaaaaaaaagaaagatatagaaattaagcagttacagaggcatacatatataaatacattaacaggagtactaatctgttcaaggtcaaaacaattttatgaaatgctatgtgataataaataattatcctaaaagatgaatttcactattaaaaagttgatgcaaatttgaagtagacagaatgtagaattgcactaaatccattaccataggaaaaactagagattaatttaagtctaatttagtctactttatctagctattatattgtttttttatggggttttccaatagttgtaattgaaatgatacttaactatagcactaagtgatagtgtaagttatgataatattgagcctattagaataatggttttttttagtcttttaaagtgaaatagcgataatagagtactaaatataagaattgttatcatagtaatcctaaacttaggattttttttcttttgcatttcctatgggacacttgtgatacaccatgcatctctcttccattatttctttatttggcacttcatggctttctaatggcaaaagttatattgattctttcacttcaactatcattatttaaagtgatactggataaaaatggaaaataaaaactgtatgttcaaaagaaatcttagttaatgtttgtgtctcagaaaaccatatattaaacatatcatatgactctactaatcgcgataatctagtcgatttacaaataataatacgaataataatttaatttaataaatataaggtatagacttcacttatatacttgaacagattattaagctatgactaaattaatgtaactaaagtgctgtatagtatgtaattagttaccttctttttggttttagaaattaaacttgataatattaccactttaaaagatttgctgttaaatgctccgacaatttacttattaagaatatttgcatagtgaagatatcttaatatatataaaatataattaatttggcatactattgatttctatcaaaagcgtaaaaatgtcaataaaatgataatgaaaggaaacctaatatgaatagctacatttaatatatttgataaagttaacctataaaaaggttgaagtaattttgtaataataagaaaaagtatcaccctaccattagataaaagaaatatttagtaataccatatctataaggcaatattttttaatagtaattgcacgactttatacattatatatttagttaatagttaataagagtatagaagttggaaaatttatatataactattaaaaaatatttagagtctcaccatttgctcttgaaaacaaaaaaattataagattaagaagaatacgatttgtatcaacttgcacctttttcatcagtttgtcatatacttgagtcatgttaaatgttcttaataaaaaaaaataatttgtaaaaagttcagttagttgcctaagtacacacacaagaggctatcattaactaggaggatgccagaaaaataatatactaaaaaatttgaacactgtataatatacaactaaaaagagtttaaaggttaatatatattctaaccacaagtataccagcattgactacagcaaaacatacaaatagccaaatcttatcagaaataatatgataagtaaagggagagtgaagtatactctggggtcaggctgtgagtgtcttcaaacaatcgattaacagattaatgttggtggcaaattgctgaggaatttacttgcgagacctctgattattgaaatagtgtgccagagataattattagcattaacattcatattttacctaatagggttcaactaaaaggaagaataagtagagattaacctagataactgggattattcaagaataattggtttattagtttattattgaccactatatgctttataagtgtttatatatataattaatatccatattttagtatattacttgatataatttttacaagatctctatacaaaatttcaatttcaaatgtaatctattttttctttatgaaatttaaaaaataaccactatttgtttaatttacataagatagtcaaagaaaattttaaactattatgaaactagttttgcaacattctaaaactagtccactataaataagagggttagtaatatatacattttacaaatatacttcatattttgggaaaaggatgttgactagaaattaatatataagaaatatgaacttaacaacatgaaatctttttaacaataggctacttttattatcatatttggggatgatagttttacaattaaataaccaaaaatcatctactgataataaatacaatatataattactcaatacatgcatcgatacatattaaactaaaaaaatctgttgtaaacatcaatgtaagtactcatttttatcacttatggaaaataataataataaattattctttcaataaaacacattaaaaataatgggtcatatattttttaaatttagaaaatccaaaacaaataaacatatctataccataccaagtttaacatgctcttatcaaaattgatttagattatcatttacattcgtcacgttttaaaaaacagaagggggaaagcgagaaagagggagggggggttaagctgagttgtattaatcataccaatttacaaacagataaaagtctagctgagtgaagatatatatacccatccctttttctttgaatttcatttcttaatgaattcctttaatattgtagaaaagtaagctgcaaccatacagagtaatttttgaaaggtagttactaaggctgaatgacactacacgagttcttacttttgtcattatttttttctattgaacaacgatatattatcatgattatactcctcttataaaagaatacttcatatagaacttatatacaggaaaggaataggcccttcaataaagaagatatgagatagacaaaaagatttcaattgcatatttataaacatttgctacacttagtagccttttctattcgcatctttaacgatatccatcaatctcttgaatcccttcataaatctccttctatgatgttgtgatctctttagttctttctttttaccaggtttcatgtaaaatctttgatccctacggtctttccacacttgatttgatgataaaattgaagccaaccttctaaatgcagttgctgtgtcgctattaattacatccaccgttctaccagcaagtggaccaaatttagtggataatgcagtttctctaatgtctgaattttctaataacaatgccttttctaatttctttttaatttcaatttcattattggcattatcagccatggagaatggattattattgttattattattatgattattaatagcaccagaagtattggtcaatgtgtccaaatcaatcttcaaaccagatagtgatgacggtttatttaagccagttgttgaatcatgtaaagtaaagtctctcaatggattattcgaaaatccaggaatattaatattaccattattgtcttgtctttgtcctttctgtaataaaggagtagttaattgtgaaaattgccttcctaacaatattttaccactattttgaaaagtaacaccactacgtattatgagtgaggtattctgtttccacatgattcctgtatgcaaatatggtgtatatatatatatatatgtatatatatatgtgtgtgttaatttttcttgatttaggatctactgattgaatactatggggacaattaatcctcaatgtctgaaaaggatagacgagaagagagagaaggtgattaggttttcttgaaacaacttacccgtactcttcaagaactaaatcttgtatatatttccaatgtcttcaactctctgttctcttgcaataatttttcccctgtccatcaactctttttatttccgaagtcatttcttactttccctcttttttttttcgcattctatttattcatttttgttgtttgtatctaaaatttgggccaagtgtatagaaaattgatgaagacagaaaaagaaaacaactacgagagaaatacgtaatatggtaaacatataagtatacttatatggatactaaggcactattagtgtgagatactgttacttcatattctagtgccaaattactattatcaagagttataattattacatatccattcagcaagaaaacaagcaggaaatatggtcgaagacgtagtggcagagaagactaatacagacatgactgttccagtgtctaatgtggagacatctaatagcaatgtaaatacaacagagaataaccgagtagaagttaatactgatgatgacaacaagaaaaagaagaagaagaagaagaagaacaccataaaaaatattgttaattattatccaaatgaaatttatcctgaaggtgaatggatggtttatgatcaagatttcaatttagcaaggaccacggacgaagaaaagcgttatttgcaaagagataaggaaagagaatctcattggaatgacgtccgtaaaggtgcagagatccacagaagggttaggagaaatgtgcaaaataaaatcaaacctggcatgaatttaactgatattgcagatattattgaaaatgccacaagaaaatatacaggagcacaagatttgaaacagatggcggatccaaagagtcaaggtattggttttcctacaggtttatcgattaatcacattgctgcgcattttacaccaaatgcaggagataaaactgttttaaaatatgaagatgttatgaaagtagattttggtgttcaagtaaatggtaatattattgactctgcatggaccgttgcctttgacccacagtacgacaatttattagccgctgtgaaagatgctacttatacgggtataaaagaagcaggtatcgatgtcagattaacagatattggggaagctatccaagaagttatggagtcctatgaagtagaaatcaatgggaaaacctatcaagtcaaaccatgtagaaatctgtgtggtcatagtattggtccatggactattcatgctggtaaatctgttcctattgttaaaaatggtgataatacaaagatggaggaaggtgaacattttgctatagaaacctttggctccaccggtagaggttacgtagttggtgatggtgaatgttcccattatgctagagttgccaacgttggtggaacacctaatttaaatagtgctaagaaattattaaaagatatagatacttattttggtactttaccattttgtcgccgttatttagatagattaggcgaagagaaatacttgtttgcattgcagaatcttgttaatcagggatatgttcaagattacccaccattagtagacgttaaaggttcctacactgctcaattcgaacataccatcctactacatccacataaaaaggaaattgtgtctaaaggtgatgactattagaatcacataaaatacaaaaagacaagaaagaatgagggaaggacagaagagagaaaaaaaaaatataaaaaagaacagaattactatacatactttatataaatattttacatatctggatatatggatctattttcttctacaagcatatatatagattgacttaatttatctatttatatgacttcccaaaatgacaaacattcccattaatcaaatgtgaaaaaaacggtgggacatattgtctaatctctaccagagtacctactaagaatgcattataaataccaagtccaactaccaactactaatttgagttgctgtttatatatttctatatatttctatatatttcaacataaaacagtttagtagcactacctctcaacaaagaaaggagaagaggaaagatgtaagaaaggaaattcaatctatcagcgctaccataattttttaaagatgagaaacagaaaacacaagaaaaaaaaataaaaaataaaaacaaaatggaaaaaaaaaaaagaaaacaaaaaacaaataacaaataacaaatagtaagaacatcattgattaatctgtgtaaattgacatcagtgggactcatagttgacaccgaaagttactatttactaatactaagtattagagtttgtaattatacataattaaagacgacttaacagtgtgtctaattgtttgttaaataaaaagtgagcacaacaaacaaacctcaaaaagactaaataaaaaaacaaagcaacaactttattataattcactatgtcttccattgaaattcttccagatgttttagaatacaaaccaccattaactgaacaatctacagaatatgctaccattaccaacaattcttcagagactatagctttcaaagttaagactactgctccaaaattctattgcgtgagaccaaacgctgctgtggtggctcctggtgaaaccgttcaaatacaagttatctttcttggtttagctgaggaaccaagtgctgataccaaatgtcgtgataaattcttggttataacactacctgccccacatgatttaggtgacaagagtgttgctgaagcctggcccgaattggaagcagaatttggttctcaagctatctctaagaagattaaggttaaatatgctcaaaattttgaaccagaggtcgctgatgttaaaacaaacgaaaacaaagaagaaactatacccgttggtaccaagaaggaagaagaagtagcacaagaagaaaatatggaagaaagagaaaatacttcatctgcagaaattacaccaacttctgccactactgatctttcaactaatcaacttgaaaagaaagaagaaaaacaagtacctgaggatgttaaggaacatgtacctgaaaagtctgctgaaacaatttcaaataacgaagtgtatcaacctcaatcttcatcatttgttccaccaattatagtagccatcattgttctattgatcgctttgattgtccgtaaattctacttataatattcaagaaattcaccaaaccaccatgtatgggagacaatgatataaaacaaaattcaaaaatgtagaaatattatcatattaagtgatatttatcttcctaatttttttttcctaattagagctttatattattctaataatcattttttcgttttcactacttatttaataagtcattttaattgccttcatatttatatactacagttatgaacttttaagattctattttctgtattaatatttatatacataatatagtatatgcaacttatttctttttttagttattgcattttaccaaactttaaataatgaattgtagagagaagatgataatacttcttattccaaattccattatactttatttgaattaaattatatatatagtaatagttgtggcatatagacccattttcaaggtataacacaaaaagaaaacagaattgatataagatgtaaatattaaaaatgatgttgatattatttaaagaattaaactaaaacacataatacactaatttatataaagtttttaatttaaaattccatttaagcttctaaagctaaacgaccctttggattggttaccttaatacctaaagccttagctctggctaagatgccaactctgttcttagcggaaacgttgtgagcgatttcagcagcgtaagacttggtgtgcatcattaaggtttctaagtccttaatgttggcgactaagaaaaccttgtgaccagatggagtcaagaacttagtcttcttgttggaaccgtaaccaatggttggttcagcaatgttacctctgaatcttcttctgacaacagaatcgatacccttttgctttctccagttttcagcaactctgtggtaacggtcagaatggtgacgcttaaactttttggagtgcttcttgacaatctttgggtgtggtaaggaagaggccattctatttaaaaaaagaaaataaaatatatgagagaaaataataacatctaagaattttattattttatgatcattctttgttagtacttcaatattttataaccataagtatctaatcaagctgtcccatgggaattcaggtgaaatacagtttaatttaaacaaaataaaggacattattataaaaaccattaaggtaaccgagatacgacttttcaacttgttaatcttcctattctacttttcaaatgttgtattctttaatatcttgctgttactcccgttctagtactctatcaaacctgattttaggatgtatcttggagtttctacaaaatatatttaaatatttctcactatcttatcttcaataatttagtctatattctaacaacgaaaacatccaccattcttggaacttgcatatttatcctggtacataccttaatattcacagtctttatggttttcaaaagtggagggactcaagaaagtattcaaaatacactagtacatcagaacttagcaccaacatataatactactagcaggtcattacgtaaatattttctatataattttatcaagaatcatctttattatggatagatcgattaattgagaaacaatcaggcagtctcaaactttgctagtcacaaagtacttggatatcaccataacactgtattacatacccacatagacacacaaagactatatcatactactaagagtctagcatactcagactgagagggatagggatagtttgtaaagcacacgataagttttccattactcttttggaaggaaaagtgaactcgtgaagagcaaaattacagcaggattccctgtagtttcatcaaacttcctactaagatacaacaccatccacaacaaccatataggatacaatggagaggaggtagtaacactcgagactttcagtttttcattgaaatatacatattctaactctctaaaaaagggaaaaacgaggaaaattaaaagagaaaaccacgcaaaaactcaaaagaagatttcgtatttaatattcctaattaggtaattcttcaatattatttttaaaaacgacggactgttatattatacatccacacaccataccagaatagtttctaaaagttctggttatgacgtctatgttcattatatcgaagatcctcataataagaatatatactagtactaatgcaaaaaaacaagattgaatattctattagtaaaacatactaccaataagtagaactattttactagtagatgttttcaaatatggtaataccaacaactgttaaaataagatggaataagtttatttttttttcacacattatctttaaggtcttgaatgacttacatataattaattttaatactaatagacaccataaatacatcttacggatcatgaaaaatgggtatcacttttgattccaaggtagaaattttatttttacactagcatattatacattagacaaatgtatcgtactatgtattaagacccagtctatgcaaaagccaaatatctttatactctaaattgtctttggacacccatttagctcgacatggatgcttttctatggaacagaatcaataaaaccttatgctcctttcttttatttttttattactttttttttcttttttttttttctattttatagaaactttaaaagaaaacatatagtcttcatcgtaaatgcgatgagatatatggtattgttttgaaaaagaaagaagtcatggattaactttaagcaaaatcaattgggtaagcattacatagttgtaacaagtccagaggctactgtattcctgacaaacattgaaaaaatgtcaactgttattgagagtgatgatgatctaaacaaaaatcaaagttttcctgaacagacattaatccaaaattatgatagaaataacaattctaataatggcgacgctaacactttgcagaacggagaagaatctcttaccagacgagaattatacccaggaatggttaatagagtttgtgacgtatgtggtataagaccggaggattataacaaaaaactgataactgagatttattattcaaattacgtgaagaaaagaagaactattcaagcaaataataccgatattgggagggataatcaatcatataattatcctggaaagaaaagaagattttggtagtgactaccagaatgtgtcattttatttttccaaattaataaagtgatagtttcatggtgtaattatttttctaatctttatagattttgatttctttttcttctttttaatattatcatatattcttgctcatgacctatacaaggcattctaatttatagagaagatgtagttactaaaacaggactatttctttagtgctttgctctttttatatttatagcttttataattgacatatgctgttttaaatgtgtttatctattattactatatgttattatttttggttcactctactttatttacctatgtactgttatatcttgtagatatgtttctctatcttcttaaatagtcccttagataactgcccaatttttgagcaccttgttccatagcatctttaatgacttgcaattcatcatctgcattgatgctaaaatcaacgaacccattattactgctattgctatagccattaccatttattccccctgtataaccattgccaaatgaactttcactatcatcagcttgatcttgaccaaagtatgaagaagaagagatggatgtagcattatcaaaacttttcaatttttctctagcttctctagcttcatcttcattataattaccacgcccaaaatactgatctgatgaaattgccttttgagagccaaatttggcagcaatcttaccagtatatttaggacctgaggcagccctctttgcctcggtatattgtttagccaaatcattagcatcattttgagtcataccaaaccctaatttagcaaacttaggttttaaatcttctacagagtaattagatgaactgttaggcaaatcatcatccaaggaatcatccaaagaatcatgaaaatctatatcatcgttatttttacttttattaatcatatcgtcagaaacattagtgtatggcttggaaacaaatttattagcgccactaccaccactattactattattactattattttggtacatgtttgtctgcgattccagtttttctctttctgcttccctttcgaattgatcgaataaatcttctgcttcagatttgttaactttctgagcggataatttcgttggttttctgctggatgataaaatagaatgtttctttgcacctatatttctattattaccacttagaatggaggacttttgtctattggaggcagttgaggttgaagaaactgactgagaattcttagaggagtttagtggacttgcagaactatttcttgggattgaattacctgaattcaatttggaagtggagtttaaggaactctttggtttttgccaatttgagaagaaatcatccacgctggcattctttgacgaacttgtagatctagagtcggtgtcagtgtcaatatcgacttcattttcatcaaggactagttcagaggggtataattcggtatctttttggactaaattatcaagatgctctttataacgtttagctacattgcttgtatatttcaattttgcattggaattagatgtatctaaaaattgcttgccgttatgtttcataaaatagtcacgggccttgtgattaccgccatatttaaatcttcttagattattaatagtccatttgtctaaagtggatgatttgacaaaagtgatatggacacccaaattcctatggactgcggaacattggatacaaagcatgacaccaaaggggacagaggtccatgttgggttcttgttaccacaatcaaaacacacacggttctctagtttggatgataatctttggaatacttgttgtctcacttcatcagaaacaaaaacttcaccgtcgtcactgctcattttttttttgttattcaacttttacctatttatttatttattcacctattccttgcttttccttgttgaattacttactaatttttgctttttgtgcaaagaactccttggtagatacatatatctctcaggtttgcattgagcgataaataaataacactcagtgttttattaactgcacctgctgattaaacttatctatgtttttgtttaccccattttcctttgatcctagtatttttcaaatcaaaaataaacaaaaaacaaaaccaaaaaagaaaaaaaagtaacgtcagcaaaacaaaacaaaccaacccgaagacactaaaaaaaaaaaaagataaataaatttagaacacccagacagctcactgcatttttcggtgtctgggtgtccttcaaaaaatatacatataggaaaaaaaaagtcgtaactaatgatgtctatgctttgttttcttgtcttttttctttttctttcttttccattttttttttcttctcgctttcaacgacagctaaatgggtgtgtgcatattatctattatgtgagttcaaagcttttgtgtgtgtgtgtgtgtgatccagctgaaaaggactaactggatagcgtgttgaataacaattacgtttgttggagtagaagttttggacattcgaagaggatgaaacctggcaaggcaaatcaaagggagagcggtgtatacaattaaatacatacatacccataaacataagcacagatacatctacacttatatacatatatgtatatagggagaaagagagagtttgtcgtgcacgtttggatgtgtaagagtcaaataacaataagacaataaaaaaaatctctttatatctatctatttatctatatatatacgctattctttaacagtgaaaagaaggtcaagagatatctaagtcgatcaaataataatgactatgacacttaacgttttattaaatggatcttacataatccgagctagtttacaaaaaacatcatatattaaaactgctccattgctgctgacaaggcactattctattaattcaaaatatagtaatctgttgattaatcaaaacagttataatgataataatattcaaagatttttaaacaatgttaaatggagacaaagactatactccactgaaaagaatgatgataataaaagtgatatttccaatagtatagaaaataatgaaaacaaaatttctgatcatgataaaaaaaatataatcacagattctatttccaataaggcaactaataattccgaaaataacactaatagtaacgctaacaccgacattaacactaacattaacaccaacactaacactaatgctaataccaatgctaataccaacattaatgccaatagtgccaatgccaccactaatgcagatataagccccaaatttacccaacaatccctggcatctaggttgtattcctctttaaatatacgtaaatctgaaaagagtattgaatcggaacaatctaaccatgaaactatcaatcacgctttattggctacaaaggaacaagaggctaatagaaatatctctagtccagaagcacaagcagaattttatagactattattacaagcaaattaccctcaatatgttgtctcaagatttgaaacacctggtattgcatcttcacctgaatgtatggaactatatatggaaggtttacagagaactggaagacattcagaagctgatgcagttagacaaagattattaaccgcaagctccgcaggcgctgtgaacccatccttagcatcatcctcaacaaacagtgataattacccaagcaataactttccatctatgtattctccattctatggctctaaaaaagaacctttgcatgtcattgtagcagaatccactttaacagtggtttctagatgggttaaatggctgttgatagttggtctattaacatatggtgtctccgaaactttcaaatacattagtgagaatacaagtcttttaaagagcaccgaggtggcagacaaatcagtagacgttgctaagactgacgtaaaatttgatgatgttaaaggttgtgatgaggctcgtgctgaactagaagaaattgtagatttcttgaaagatccagctaaatatgaatcacttggtggtaagttaccaaaaggtgttttgttaactggtccaccaggtacagggaagactttgctagctagagctactgcaggcgaagctggtgtagacttcttctttatgtcaggttctgagtttgatgaggtctatgttggtgttggtgctaaacgtataagagacttatttgcccaagcaagggcacgcgctccagctattatcttcatcgacgaattagatgctattggcgggaaacgtaatcctaaagatcaagcatatgctaaacaaactttgaatcaattattggttgaattggatggtttttcccaaacttctggtattattattattggggctactaactttcctgaatccttagataaagctctgacaaggccaggtagatttgataagatggttaatgtggatttgcccgatgttcgtggtcgtgcagatatcttaagacatcatatgaaaaaaattactttaggtaaagatgttgatcccacaataattgcacgtgggacgccagggttatctggtgctgaattagctaatctagttaatcaggccgccgtatatgcctgtcaaaaggatgcgttagcagtcgatatgtctcattttgaatgggctaaagataagattttgatgggcgctgaaagaaagactatggttttaactgatgctgctagaaaggccaccgcattccatgaagcaggtcatgcaattatggcaatgtatactaatggagccactcctttatacaaagccacaattctaccacgtggtagagcattgggtatcacgttccaattgccagaaatggataaagtggatatcactaagaaagagtgtctcgctcgtctagatgtatgtatgggtggtaagattgccgaagagatcatttttggtaaagaaaatactacaagtggatgtgggtcagatttacaaaatgctactagtacagccagagccatggttacacagtatggtatgagtgatcatgtcggcccagtgaatttagctgataattgggatagttggtctggtaagataagagatattgcagataatgaaatcattgaaattttgaaagaaagtgaggaaagaacaagaaaattgttaacaaaaaagagtactgagttgcatagacttgccgaagggttagtagaatatgaaacattagatgctgcagagattgcaaaaatttgtaaaggtgaaaaactaaacaaattaaaaatgtccacgaatacaatcgttgaaggtccagataatgatgaacgtaaggatgtaggtggaacatcaaagataccaacattaattaaagcataagtattgttgtaattgtactgttattactagtactattattattactaatttttaattaaattcatttatttatctgtttacttgtttatttttaaacaaccatgactgacatacataaccatgtaaatacattcatacatacatatattgaactcaatataacgaaaaaaaaaactacttggtaattttagtaatactatgactgtgttgtgattgaataatagttagtatacttcttttttttcatatttgctgcattcattgtatgtatacacaagatgaataattattatgtactttgttttttatcaacatgctctgtatttttattactgttaccatcagatgcttgttcaagttttcttttcaacttttgaacaattacatttggattcttgcagtagtatattttagcatagattaattttgcatcctgtgtagatatggtttgatatgaagctatcatttttttacagtccaatattatattcaataaactttcaagattaattttattttcttcatctttattgccatttttcttatcatcattttcagtaatattagcattattattattgttgttgttgttgttggtagtagcagtggtagtagaatctgtgaattgatttgtttcagtggaactaaatttcaattcaaggtatcttctgattaattgttcatcctcgtttaaaaatacagctaaatttatctgtggtggagtgaaatgatatacaacatctgtcaataatgcatcagtaattttttttttgcatttatcatagattttgcccatatagttaagatccactttaccgtgtaggacattttgaatatctaaatagaagccatgcaacggtttgtaaggatggtgattcaataaagtaaatttcagactttccagtaatttgaattcatatttcaaaatttcatctctctttgatttagcttttttggcaaaggagtcgacactaataaaataattttctgatttacatgccaaaaatattgtagtatgaactagatcctttggatcgaattctgtgacagaattctctagaaaaaatcttttgaagaagatgattgaggtagccacgacctctgtaggtaaattcaaatgttgtgcaatcatttgaactttctttgcataaaagctaaccaatttaagttcttcatccggggtaacaggaactgcctttgactttattgtttggatctctatatcggataaagaattttgtttatcttcaataaatttattcaaagagtctttcactttcaaagttgcgttttcatttactaaaaatcgtttttcccttaatgagtctgttgtgaaggaccaaagtctatattgtgaggatcgtctgtataaatcatcatctgtgactcttttaggccttttgatttcttctttattcgatgagagttcattttgatttggtatgtttgtgacacctgtattagtgtcttctgatacagttgttgtatccttctcagctgatatagacgacatatctaagtagtgtgcaaaataaaataagagaaaaggaaaaaagaatcagacaaaaaagtaactcaaagggtgaaatgtgagaaaagtaatgtagagataagcttgtttgaaattattctgtttcattacgaaagttttaaagaatatatatatatatgatcttgcacgtgaagactgtaaacgttggatatttttattcttttaagtgttttccctgtagcggttttggtttagtttagtaatctagctttaaagaaaattttgaaatatgaaaaaaaaaaacaagttttattaaaagacctaaatatagacagattaaaaacatacggaaaacaaaaaaaaccaacaaactgaatttgttaccctacattgatatattattattatgattgttgaagactttcgaagtgttttatatattctattgtattatattataacacaacatattttacaatgggtcgtacttttcttctgcagtagaattaaacaaagaaaaaaaacaatacacaatggtcgctggtaattaagcaaatcgcagtggtttggcatacgatttattattcattatctattgttcacgatccattacttactagtctattattcatgaccattgatattttacaaacataaattattcttctggattacgtaatactcactattattcagttcctcctctcttttttttttttgttttgttttcttttgcaacaaccagtgccttctttttcagaaataaatacaaggaaagaaataaaaaaggggagagaagaggggaggggaaagaacttcaaaagatcaagtcgatgacatcaagaatatttgaagtaaaaagagtaagaacatgatttgattcaattttacaacacattcttttcaagtttgtttaaaacagaatggtagaatgaagagaatcctcgaaggaacttattttttttttggtttctccagctttatcgtctaaaagttgatggaactcaaaaggaaatcatatgactacaaagagcagattggttacgaattgatcggtcagtttttattctatttctttttttttttatttttttatgtatactggttttattttattagtacaacaatttttagaagaactactactttaattgttaattaggcatatgtgatatttaaaaaaaaaagaaaaaagaaaaacatttatctatctgttcctacttgcctttccaatatatttattctagggtaaaaagttttttaaaaatggataaatttactaatatttggtccatatttatttctaaaagtaaacatgcttatattttcttaagtaatattaatgagggtagaaatcaaaatttttatcctaataatagcaattatagcaataataatttatctaatgaaacttttaaaataaataacgtgcctttcaataagcctgaatcagaatatattcatgataataatcataattctgatacaactgatgactcctatctgttaacagattttgatttgagttttcctgatacttttattcatacagaccagtttgccatgaatgataatacctcagatatagaaaatatcccttctccttccctttcaaacagtaataaaaatcgtctttataaaattgtgttgagtactggtataatggtaataagtttatgtgttggaatactttttatatacctcagtaatgcttcatctataatgagaacttctgtgagtgacacatattctaatgttcaacaaggtcgaaatccttcggatttatttaattttaaaagacaaggtataatccagcccgcgaatttttctcatagcttgacatacaattcagaagtaagaagatcttccaaaaaattgtatgaattgttatcaggttccgatacctccttttatgacgatgaaaatatgattttaggtacaacatggtttaccaaaaatgtctattcaagacaaccttatgtcgctaatggttacataggatcgaggttaccaaatgtagggtttggttacgctttagatactttgaatttctggtctgacgaaccaggcactttaaataacggttggcccttaagaaatcaaaggtacgcaggctcatttatctcagatttctatagtcttgaaagcactttaaattcaactaattttccagaattggatgatttgggttactctactgtaatagcgtctatcccagaatggacaaatttacaaattaaagtgactgaccggcaaaggattattaaccatacagcttggttcaatcccgtagatgttcaacttgatgatatttccaactataatcaaaacctgtccatgaaggatggaattgtcactactgaaatggattggtacaataaattgattcatattaaaagtgaggtttgggctcatcgcagaattcatcccctaggtgttatgaaactggaaatctcacttaatatcgaccaaattgatgatcatgatggtggtggtgctggaaattttgatcatttggaaattgatatatatgatatcttggattttaaaacttcagagagaacggtattaaaagaattggccatcgatgaaaaaaatgatgctatttatattaccgtacagccgaataatgtaccatattctaatgcaagtatttattccacctgtgtcattaaaactaagaattccaatatgacagtggagaaattatttcaaaaagaagaaaataaagtatctctagccagaaaaacaatattatcaagagattcgccttcaatccagatagaaaaatatgttggtattatgtcatcagaatttcaaacgaatattatctatgaaaattgttcaacgctagaagtagctaaagatattgttttggaacataaggggaagtataatgaattactatcatctcataaaaaggcatggtacgcactttataatgatgcatttattgaaattccttctgatgcactacttgagatgacagcaagatcatcactttaccagttgctagcaaatactaggcattataacgtttcagagagaggattgccagtaggtgtctgtggtctctcttctgattcttatggtggcatggtattttgggatgccgatatatggatggcaccagctttattgccattttttccaaaagttgcacaaaatatgaacaattacagaaactcaacacatcaacaggctcggttgaacgctgaaagggcaggttattcaggtgctgtttatccatggacttctggaagatatgcaaattgtacttctactggaccttgcattgattatgagtatcatattaatgttgatattgcattagctactttttcaatttatatgaatggggctacagggatagacgataactatttaaaatacacaacgtggccgattgtccgtgatgctgctcaattttttactgaatatgtaaaatataatgaaactttgaagcagtatgaaacttataatttgactgatcctgatgaatatgcgaataacattaacaatggtgcttttaccaatgctggcattaagactttgttaaaatgggctatagatattggaaaccatttaggggagtctgttgatgaaaagtgggaagacgtatcacataatatacatataccaaggtctaaatctaatattacactagaatattcaggaatgaataatactgttgaaattaaacaagctgatgtaacattaatggtataccctctaggatacattaacgatgaatcaattctgtataatgcaatcaaggatctctattactattctgaaagacaatcggcttctggtcctgcaatgacatatcctgttttttctgctgcagctgctagtttattaaatcatggttcatcatcacaaagctatctttataaatcggtattaccttatttacgacagccttttgctcaattcagtgagcaggctgacgataattttctcactaatggatttacacaaccagcttttccatttttaacagccaatggtggatttcttcaaagtattttatttggtttaacaggaataagatattcttatgatgttgatccattaactaaacgaatgtcaagggtattaaaatttaaccctatgcaactgcctttgatgccaggtggattagcaatacgaaattttaaatacatgggtcaagttttagacataattattgatgactataacggtacaattgttcacaaatatgggaataagcccattaaaattttagttcctgagagattgctaagtgttgatcgtgatattgatgtatacacaagatcaactgatgaatacaacccagttcaccataatgaaagcaaatctcatcaaacagctagcttgaataacactggtcagtattacattctaaatccaaaacaagaattcgttctacccttatttaagccagggcttaatattgccaacaacattgcagaaaatcaatatattactaatttaactgcaggtgtggctggagatgtaagcttctcagctattgacggcaataattacacacactggcaacctttggataaggaagctgagggtagactattaattgacttaggaaggggaaatgcacaaaaaatcataaaaggcacggttttgtggggacaaagacctgcaaaatatctctcagtgtcaattctccctcatagtgatatcattgagcagattatatcaaatataacttctatcttagaaaaatcgtccttagttactgttaaacaaactattaatgaattattaaaaaacatttccagtgttgacacagatcataaagaatgtattaaagatgtattaactgtgttagattggaaaagtgataaaatcaacactataggaaaacaagtacccgatataggattattttatgagaaatttgttacagtaatagaaaagttagaaattacgccaagtgagccctattttggagaattgatggaaaagtcctccattgaattgttaccaagtaacaaaacagattttgttattgattattcaaaattgaatttcaataatactttaaggtgctttaatcattcttctcatcttacagatgatttaaaatcaaggtatattgtcttatctgttataggtacttttgatgatgacagcgattccaaaggtgcaacaataaaggagattgcatttagtacttaaaaattattaaactttaactatatcgtaggtaattacctatttaacacttgtctttttataacaaaacaactcgaaaatggtaagtgatttgtgctaatgaaaagttttcatatggtattatgttattttaaccaataatattaagaaagtacatttaactgactcaacacaaataaagagaatagagttcaaataaagcccattatttttggaaggctagctgcaatacgcttagcgtaaaatgattctattgagcaaaaaaaatgaaaaaagagaccgtcctattcctttatataaacttaagttattttttttaattcttaggctgcccttgtttatttttatccaaattttacatgttaataggttacatctaatacaaggattcataaacagaaatttttatcaagtttgtaggaaggttctgatctttgaatataattatataatggctatttatgtattaagtgtacaaatttttttgaaaatgataacgtaacggttgctcggttgtttttttcataatggttcacctccatggtgaatgtttatcaaattttaaagtaattgatatttatataaaaacatatataatacttgacaaagaatcaaaagataaaaactttttcttacacaataaagtcacaagtttacgtcatagatatctacctattatccaatatactttcattataataaaactttgcatttgtggatcatgttgtcatctatcactgtgcgttagctagttggcgtattaattggtgagttctcgtttttccatgttgatatgatttgcattcaaatatgtgaactacacattacacagaggatactcctgatagtatttctatttgagaaaaacataattctctgttggaatcttatgttttacaacaaaaaaactgcagatggttctatttacatataatgtcgtattaaatgatatatatttttacataaaacaaaaatgcgaattctgtggatcgaacacaggacctccagataacaggaccgaagtcataactcttcagtctggcgctctcccaactgagctaaatccgcaaaagaacgtggttttcgctgtagaataaggaggtaacactaccgggattatataagattctatctgaatctaaagtgctctattgtgttttaagttcaacgcgtccatttgccacctagtatacagcgtgttcacacatttttgttactgctccaccataacatattgttctaaatgttctatgatcttcgattatattattgtaactaataataaagatatggattactaattcattaatatatcaagttgaatagttgatcgagttccagaaaacatataaaaggacaacgttttctgtagatggaactattttctgttactcctctcttacacataatttaaatatattatatataaaatgaacaaccaacaaagcaaccaccgaacatcgaatgcagaatacaataagcaaatagtataatttgttggaaaatgagagtttattactgtcattttcataagaattatttttaattagtttttctatatattatgtggtgtacggatgtacataatatcaggaaaacattttaattgtcaccaaatatgtctttcgaagatttgaaaagaaatgaaaaactttaaaagaaaacttaaagtaaataaaagaatgtatactgaatacactatataataaatatgtacaggtatttaatacaaaaacataacaagtatctataacttaatgatgtctatcattaccatggacgcagaaggctccaaattccaacatggtagcgtcgccgttgttgatgataacgatactgggaacgataaaatcatcaatgatcaaatcaatgacttgaaaaaagaaattgtacaagtcatatctaatacagatttgactgtaagtgaaaagacaaagaaaactaaagagttaggggaattgattgaggccctacaaaagattttaaaaattggaaaagacatggacaatgttcacatagaaaaaaatatagatgttgaacaaaagatagatcttattccaaagaatcaagaaataaataattataaaggttacatacttttatcaaagaaagatgaatatggtttttattatacttttaaaaatttagatggcaatattattaaatattactatgaaaatgataactataaatttaacaagaaattatctaaaattgaggaaattccaatctggttcagatcattatccagatatctaaaatcatggaactttgatgatgttacacaattgacaggtaaaatagaaatagataaaaatgaagaggaaataattagaaacattgttattaattctatgactgatgatatggaaaattttgacttggatgaaaaatcaggtattgaagctattttgtttattaaacagctactaggtgaagaattccctagaagagttaaggacagaatgtggaaagaactgattgttgatgagttctgtactgaaccagaaaggattaccaaggaatttatgtacatggtgaacttagagaaatggagccatgtaaaagatgatttctatagaataaatgataactttttaaaaacaaaaattgaagaatcattaacaaaaaacgtaaaacaagaaatgattaacaattttttaaccggtaaattaaaaggtgacttaaggcaattgaatgttgaacaatatataaaagcaattcgggattcaattagattgatgaatatagaatactgtgaatcaaaaaatttaacccgtattgaaaaaagaagatgtattaactgtaattcgtgtttacattatgccaaaaattgtagaaaaatcaataataacaatacttacttgaaaggaataaattataataagaaagaagacaaggaagagaagaagttacttaggcctggtgaaatcaatgaatcagaacactagatcaataaaagaaaaggtaaatgaactgaataccatcaagaaagaaatgaagaacatgaatactaacatagattccagagaaaagaatatgaaaatcgaaaagaacaaaaaacaacagactcgaaaagaatcaaacattaaagatatacataataagtacaatataaagataaaaaaaacatactcaaaaaataaaactaatgacaaagtagttattgatacagctgctggtatacatttggtacacaataaagactggttattaaacttttcatcattgataaaaggaccagaatattggggtgtaggggatgatagaaacccaatagaaatacttggagaagggatactaccaattaaaggaggtagaaataaaataattggtgttacagcatactattctccaaaacaagatgcaacaattttgtctgcagacaaactatatcaagaaactggcattaccttagacaaagggtatgaatcgctagtgaacaaagaaaatgagtttgatacgaaaaccttaaaattaggaaacaccatatgggtcgatacagataaaattatagctgtcaagatgactgataagataattagagcagttaaacctattaatccattagcgataaaacctaatatcacacttttagaagctcacttacgtttaaatcattttccagccagtggaataataaaatcaatagaaatgaacaattttgatgatgtgaaaatgataaatgataaaaaaaattctaaaaatatatggtgtgagatatgcgcttcaggtaaattacatcgacactttcattatactggttctatgaatcactacacttcacaaaaggaaccaggtgcttcttggagcttggatatatttggtcctgttgagcatgttaaagaaagatatttactcataatggtggatagtgtatcgagatttattattgcaacaacccatatcaagaaaaataaaaatgaaataggagaacaaattggatacaatataaattggattgaaaaacaattcgatgtaaaagttaaagagttaatcatggataggggtaaagagtttgacaatcacgtagttgaagaattagctcacgaaaacggtattaatattatatatacttctactgaagatcaccaagctaatggaagagctgaaagaggtataagaacaattattgaggacacaagaacattattgctacaatcaagacttcccttaaggttttggacatatgcagctaaagcttcagtgaatgtgagaaactgcgtatataacaaaaatgttggagaatcaccattaatgaaaatatcaaaacataaagtgaaaattaaattaagatcattcataccatttggtgccccagctatgatatgggattacagaagcagaaaaacagaagcaccaggaaaaagggctataacactatccaaggatccaaaaggttttggatattatttttatgtaccaaaagaaaaaagagtgataagtaccacaaattatatattaccagattatacaataaatcacagtttaaatgagaagaaaggatatgatattattggtacatttttacatgaggtcaaaaacaaaattggagatataaatgacattgattatgacgagaatgaaatagtaacattgttaccatcagattttgaaaatgaacatgataatctggtagatgttttacacgaagatgaaataagagttaaagaacatttactaaatgacatccaagaagaaattaacgatgtaacgccaattattgaacctagaagcatagaaaatattaaattagatgaattgtttgacgattttgaagttgaagaagaacatatcagcgaggaaacggaatcaagagagtcattaggagaagagctgattacttctcaaaatactgtagacacagaacaggatgaacaagatgaactgaatgtgaacaaatatgaaccagaaactaattataatgataataataaaaatactggtgtcgaacaatatccggaattaaacagcacatataaatctcaagaaaatgatcaagctagtttcatgcaagactcattggtaagtaaatggaaggatatattgaaaaataagattgaacaggaagaaattaaaacaaacattattgaagactcatttaaacatagtaaagcatatgccttggagaaacttaacgaaacacatacaacagaaaagaaattagaaactgataaacaactagtcttagagaatgacctcaatataacactacaggaacctgatactcttaatatagaacaagaagacacacaaaaagaaaaagataatgttgaacaacggaaagtatcagaaatagaattaagcaataatgaaggcgcagaaaatattttgaaacatgaagaaataacaacaatggatacaaacataacaggtcagataggacataatttaaagaaatcatcaaaatcattgagatcaactaataataaattacatcaagaaattaatgacaatgttaaaaattttataaaacggaagatagaaactgaacacaaaaaggaaaaggaaaagaacaatgaaaataacagtttacaacaagttctagaaagagaaaaggcactggaaagtaatgatattagtgttgctaagattgacgaagaacaagaaaagtattatgatgctaaagaatctgtttcactagtatctacattaccaaaagaggaagataatttaactaaatcaaccaatactacagactggacaaaaaaaaactttacttccttaaggaaacctaaaattaaagaattaaagaaaagattattagaaaacaacttcgaagaaaccaatcttgataatatccccaagattaatttaactaatattgataaaaaaaataaagacttacaccctaagaagatttttaagaagaaaaagataattcgttatattactcctacagaaaaatgggaagaattcacacctgaatcacggggggaaagtgttccagaaagaaagattagagcattattttataaacaagctataactgagaatcaaaatttagaagaaaagattaaattcatagaagcgtataataaagaattacaaaatctagttaatatgaaagtaattgatttgaatattgccatagacaaaagtaaaatacaaaaggataaaatcgtaggaacaaattctatttttacgattaagagagatggaacttataaagccagaattgtttgtagaggcgatcaacaaacaagcagtagttataatgatattgaaacatccattttaagtcttgattcattgcgaattctattgattattgctaacaataagaagatgaaattaaagactttagatatcaaccatgcatttttatatgcaaccttaaatgaagagttgtatatacaacatccaaaaaatgcaagaaaggttactccattaagaaaggcattgtatggactaaaacaaagccctaaaagatggaatgaaaccttaaaagagtctatgaatggtatgggtctatatgataatatttactcacctggattattcgtttcaaaggatggtaatttaatgatagcagcatatgttgatgattgtataattgctgctagaacagatcaagaattagatgaatttataaatacattggaaaaacaattctcaataaaaatagttggtggaatgaaaaataatatgcttaatacagatattttgggaatggatttgaattatgattatgaaaaaggggagatagcattaagcatgactagctatataaagagattagaaaaggaacatccaatgatattaaatgataaattaaaagaagaaatgattccagatattgataagtttaaaataaatccaaaacaagataaattaattatgactaaagaggaatacaagaagaaagtaagatatttacaagagttaatcggtaaattaaattatattaggtctagaggaagaattgatatagaatgtgcagtaagtaaaatggctcgattagttttatatcctcataaaaaggtaattgagttaaccgaacaaatactaaaatatgtttataaaacacaagatacaaagactgtttttaaaagagaagaagtagaaaatatatcaaacatcacggtgatttcagatgcttcgctagcatctgaatttgatcttaaatcaagatgtggtgcattaatatggttaggaaacaattttttccatggattttcaaaaaaatcatcaattttatgtacatcatcagcagaagctgaattagatgccataaatcaggctgagaaaattgcattgctattaaaattgaaattagaaaagatgatggattttaaaaacataagaatatgtgtaattactgattccaaaccagcattggactggttgaaacaagattattttaaagcaagaaccaaatttttgggacttagaattgaaagattaaaagaaagaatattagattcagacttaagtctaagaaaaatcagtggaaaagaaaatcctgcagatccattaacaaaatccactactaataaagatataaataaattaagaatgattgtacaacatgaattaacacccaaagagttgcttccaatcactgtcctctggaatgctggtaatggaaatcattaagttatagtgaacaggaggaagttataagaaaaaccaattaaaggggcatgttggaaaatgagagtttattactgtcattttcataagaattatttttaattagtttttctatatattatgtggtgtacggatgtacataatatcaggaaaacattttaattgtcaccaaatatgtctttcgaagatttgaaaagaaatgaaaaactttaaaagaaaacttaaagtaaataaaagaatgtatactgaatacactatataataaatatgtacaggtatttaatacaaaaacataacaagtatctataacttaatgatgtctatcattaccatggacgcagaaggctccaaattccaacataattatataagcacgatatagccgttaatatataagaccgtattaataattgcattaccgattgtatcaattattgtctcgattattaatagattatctgtttgatatttctagcgctttcctgaataacgcaaaactctgaccacatcatattacaacagtttcctgttattaagctgagtgctacctttattgaaaagataaaaaaataaatattttgaatatttttggttatttataccaacaacagtaacataattaatcaatcaattacaattataattgattcgtaatacaacaggaaatggatattcagttgggttttataagaatataaaaggacactactttcatgaggataattcattttctacaacgcttccttcttataaattttttataatatgcattagagtaaggataagaactagagccaggatggaataactattaaaaaatggaaaatgtatacattagtttggcttacccaaagaatgttcttagtaaactgttagtatttttttatagaaaaatgactagaattttaaaaagaaaaatctttcaggggaagaataaaaagtatacaggaatatactcaattataaatatgatatatgttgagctatgactagatttatgtttaatcacctaaatccgccgtaccatgtgattaaaaaaagttatgaaaatttatattaaagaaggctcaagataaaattagtacactgtataatattgtatcttgtatataagttgtgtagaaggaagagaaccaagcaacataataataatttgtagttccactaatataccactattaatagctgagaacttacaataccaccaatatcctactgtaagttttattatcttattatattaaattaaagtgaatgttaatagaattttttattccaaagcctagtgtcaacaatatataaaaataatgtacaatacttgtataattttttaacacttaagtcgttataaagatagatattaaatcttctacttttcaatttttgaagtgctttgttattatgtttattttgcgtggtcgatttttaatttacttgtgtttttcaacaaaacttaaaacgcaaaatgcaaacatttcaaaatcctatttaactatttctttttgtaactaactgttgaggatgagcgcctttattcattggatatatagtaaacattctcaatattatattaaacagatttagtatacaaaattataataaagttcttcactttctttctttatatacaacatagaaataataatatagaaagattgtaaataagataaaaataatgtatgaagaaatccttggctttatatatgttaatattcagccattttcctctacgaacagtaagatatttaataaataaactcaacaacttttggtgacctctcaacaattattactcaacaatttatcgtttagtgtctgctaaaatcttattgttctatctattttatcataaaacattctatttcaacactaacactctacttagctcacaacaattaatggtagtaccatttatagttttatcatatacagattgctaatgttaatcatactatctgtaaatcagagcaagaactataaatgatccaaaggaaaataaaagttgcttggtccaaaaagaagaaaactgaaaaaaaaaatcaagtattaaaacaaagaaaacaagaaaataaaataaaatttataaataatttcatatacctagtaatgttccttcattaactaccaccacctcttttggaaattcaaaccaattgtagaacatgaaaaaacaaatccaatatagattttaatataatttccaaagaaacagtacaaaggagcaggcaaaactacgtctatataaaaagaaaggaaacacaaaaggggaaagtagggaaagaataacaggcatcagtattttatatattatatacacacctaggaatgtgataggcaaactgacacctaaaagagaagaaagaagaaggtaagaaaaagtaagagaaaggaaagaacattataaggcacgatctcttaaacgacacaatctaactctgttgcgaattcgtctcatgctgtattatgtaattctgtatacgaacaatcttcacaataagaaagtaagacaaaaacaaaaataccaaatcaaacattagaaaaaagagactttccctaaatggcatagatttcaacaataatgttaatataagtttttctcctctttagggtctttgtttttttttttttggtttgcctaaaagtgtgtttatttttctttttttttgacagaaaaacaaaagaaaaagggtaagaaaaattctttggtattttcattttcttactgctatattggaaaaacaaaaaaaaaacacagaaaatttcataagttgaaaaattggaaagaaaaagaaaaaaaaaaagaaagcagtaaaaacacaaagttatatgcttagtactggtaatttttgaaactacaaaatcatattgttgagaatacgcacttcaaaacaaaaaaaaaagaaagagaacgttgtcacacacattaatttaatgcataattagcttgcctcctttcccttaatatatatatatatatatatatatataaacacaggcatcaactaagataataccacttttcaccttaaaaaaacaaacgttagcaccatttaacaactactatccaaataaccgatacacaaaaataatatcacataacatagataataaaaaaatactccagaaatgactgaacaaaccattcctgcctattattattatattgacccatcaatcaattaccccatacagcagccaaatccattggatgatttaatatctgtctatcatttgtctgatatatcacgtcaagttgcacgaactaatatagatggatcaaaagctataaagctacgtaaatcttacaaaaatcaaataagcgacctttccggcaaattctccgttataccgacccgtgagaatggtaaaggtggtgagctggcaccaattatgtttaatacaaatgcagatatgatgaaccaagtccaccgtcctactgatatgacagatgacaaagattggagacagatgttgattaatagagactccaaattattcgagagtagcgctggtatcgactgggatctttgttcaaatgtcttatcccaatttgagagatcatatccaagtgaatttcaaaatccatcggcaggttttcaattggaagatttagcattcgatttggatgggaccggaaaaagtggaggtggtctcggtgggtctaagaaacgtaaaaataaatcaaatgggtcatcaatgacaactcctaatagtgatgtttcatatgatgattcgaaaagaagaagactggaataatcaatatatatatatatgtatacatacatatatatgtttgcgagcgtgtgcttttttttttcttttctttaataaccttcatatttccacctttttgttttcttttattcaaaagaaaaaacaaataaatgggagagaaatcatatacttaacctcactcctagcaatctttaacttccacatggaaacaaggaaaaatatctaaccctaatttctctatttcctgttttacttgttctatgcaacatcgaaatccaaagatcctttctaaaatggtcggagttatccaatcttactgctcgatctattactcaatctactatttctgacatttttttaattagtttgcctttttcgtgatctgaaaatgattcttataatacaagtagccattatactacgccctcatcttctttggaagttgcttctttttgatattttcatcttatttaaaaaatccatgacaaagaagcacaaaaccagtacattaggaagtatcaacatcagtcactcattaagctagaataataatagatcggagtttgatgtattttcaaatatagttgaaacctcatctgaatccattattaaccgtgatgcctaaaataccgatatttccaattctcaaaattgtatagcatcacaaaacaataattttaattcaaatgacttgaatcttccagagttttagtgacctgattttctatggtgtaattttttgttagtggctggttggaaaactaatgccaattcgagaaataaggtgatcatctttattttttttgttttatgttacagctcctatatttatttatatttattccttattagactttagcaagataagcaataaagtcaaaataacaatattgtgctatcaattgcttaaaagaaaaaaaatggttagataccaactaaacctttatttatataaacctctgtcaaccatcattattcacagtagtaaggtcaaattacattagtacatgtgaaaatttgttcaaacaagatctgtaatgtccttatggctacatatgtaataatgatacacatacagtacacatgtcacagatagtgttgctaacttttattatagtaaaaagaatacaatttccgaactacaacttgataaataaatattaaccaaagttggtgataatgcgaaaaaaaaaagctcaataaagttttactagtttcttctacaagtcccatgactgttaataattcacttagtatgagctcagaactatggtctactaagatctacagcatatatataagtctataacatcaatacctgacattggaaattagatattgtgatttaataactttactatagaaataaatgaaaaaaaaaacatttaacaataataacaacaattttgatcctttaaatataaacaaaatgtttttatttatgtaacaaatataagtatataagcttctaagtacttatagtgttctttctttttatgttgcttcctactttgctataattttatcttattcattagtgatggtttttctttaatataattcatgaagtagagaaaaaaaaaaaaagataatatttcagttggaaagtaacactattaaaaataacatatatgttattctaaatataccataacgtaaataataagtgatgctctatgatatctgataatctgcaggaaaagattgttaaaaataaagattgtttaaataagaacgttagaataaaaaaacttaaatggaaacgaaactacaaagcatgtttaaactgcagaataaggaaagttaaatgcgatttgggtcctgtagataacccacatccaccaccttgtgaaagatgtatacgacaacagagggaatgtctatttacaaatactatacgtgagaattgccaaactattgtaactgatactgtatccattaatgccaatgctacttctgtttcacaagaaattaaatcattaaataaactatctgatatcaataacgtacaggtatcctgtaaatcttccaatgaagatgggacagttaaattagtgaagttccctgatagagaacccaacaatttatcccctaatgataagatagataaaattaaaaatcataaggacacatccaagcaaaatcttgagaataatattagtacacatttgacaaatagagaagacataacagatcatgatgatttttccggtggtaaaaaatggagattagaactagcttcaatgcaaactacactgcaatttttagctgatgcagctggaacagttgcaaaacataataccgtcgaaagcgcaaaagacaaattaaataaagacaatctttttactgaaaagtcaaaaagatttgttgataacaagcaagaaccattatctaataacggaaaacttaccagaaatttgcataagtctgctattgcatcattatataacttaaatggacctgaaaaaccattttccctccttatagacaagttaactaagattagaccaagacctgacagagtactttctgactttaactatattggtcccaccggcttgttgacaaaagaagaggcagttgaattcattggactttatttttcgactatgcatccttattttccaaacattccacttcagttacatgatccaactgaattggcacaatatcctatattactttgtgcaatactaaccattgctacaaggtatcacacattcaatgaaattggatataataatggtagagataataaacgtaatattagggttcatgaacaactgtgggatatttgccaaaaacttatatctcaaaccatatgggctgaagctagtacaagatcaattggaactgtgctagcatttattatatttactgaatggaatcccagacaaatacactggaaaaaagctgattatgctaatagcaccaaagaagcaaatacggataaaaataaatatatccaagctaatagtaaaggtaatgaggaaagtacaggtattggtgcaattaggagaagtgacagaatgtcctggatgctcacaggtactgcagttcgtttagctcaagatatgggatttcttgaaacaagcacaaaagtgtttgttgcagctcatatatcagatgctttgacttcaatgaatatgaatcaaaaatccgtcctctctgaaagcttcagtgatattagttttgaaagacaaaaatatcgaactatcacctcatatgaaatatgtaaagaagaaggtcaaacgaatattggaaatgaattattttatttagaacaaatattaaaagacgacccagagaaagaaaagtggatcgaaatattaaaagccgctcaaattgaacgaccaggtggtttaacagacttagaaagggaatttttaaatgatgaatatattttatattattccagaaataacgatgagattattcagcatcaacaacaaaatcaacttccataccctttaaaattctcttttagtcagagagccaatattgaattagtacgtatcatacttattggatatgatacaatatactatgacaaaggaagaagaaaattggcatctaataaccaagtacataatctcgctgttcttaatatattaacaccattaatcgagggctggtatgatacttatagagaatgtatgaaaattttacctggcaaagcttatgaaatttcaataaagaaagacaagagaactgtacataattacacacagcaaattatgcatgaatcattattatgtgattattattattgccaattatatatttattctttagcactacaagttgatgcaagagaatccaaattaagaatgaatgaaattactaaaagtgctaaatatgttgcaaaagcttacaacgctgccaaagaaatattgtattcagcagtcagagtacataaattaaaattattaaaatacatgccagtcaaatgggtaatgcgaatagttcgtgccgtttctttcctggtaaaatgttatttaactttgaccaactcaggtgagacggtcgggaattccgaggctagaaccattttaaaactgtgttgtatatctcttgatgaaacccttaatgttatcaaattggctgcaataacattaaaagaagcaagccctgatgaactacatttggcgttaagatattcagcaatattattatatctttgtaaagaaatgactctaaaaaaggaacaaaacaaaaaattattagtaaatcgtgaaatcataataaaagaaaatcgttcacaagacaattcaaatgattttgcgactgctcctctatacaagattaatacaaaggataatggaaatacactggcctctacaaataaaactaacaagcaacagaaagtaaaagtatgtgtagttccaaatcaagataacaacttggacgattccaacactactaaaaagtgtaatatgaccatagtggaaccatcaaaatccttttcaaatatacgcaacaaaaacaatgccgatataatgacagtagaaaacgaagcctcaatagttaattcctccttcaatcctatcatacataataatgacaatgttattttagacactaccataatatcaacaagtgacaacccgttattacctgataaagccattgattggttttcgggaagtacaaatattgggttagattttgtacagccttggacagaaatgcttgaacaaaaatatcttcaatatggtaatacagactttgatacgcttgattataatgcggaagatatatataactattttggttatgaatttgagaaataagaaccatcatagttacccttggagttattatataaaattcattggatataataattttgattacctactattttttttttgatgaaagcagagttaatttttgatgattattttcttttatctagcatggctatttaaaaataactggtagggaaaaaatgctttacataaacccaaaaataccttattgtatggtctgtctagtttatttcaaacctaaaaataactaacatgggcttaattattccactccgataagttataaatctgtgttgtagttactatttaaactacacaaaatgacagtcagaataaaatgcttcatcaaccaaataactaaaacaaataatatataatattgtttttacttcttgcataatttatatatgtatatctatttagaatgaatgttcattaatcattaaaaaaaggtggtgactatatacactagagatataaaaatcatctattgtcagttcttaacccttctatagataaataaatatatcaatataagtcttccagtgacagaaattgagtagattattttattaacaagtattgctatgtgtctatttgtcatagtcacatggagcataaatgacttgagtaataaatttaccttcatatcttatagtacaaccaacacaaacagtattatctttgattgatgttgttaacagatgttttaaatttacatgtggtatgatattgttaatcgtattattcttattaaaatttttattcaaatatgtagaattcaaataaatgggtaaatctggaactttatattttgttaaaaaatactcttctgcctcttcagtggtcatcttagctattctttgaatattagagaataaagagtcttgattgatatccactacctttgataatgtaaaatcaaaatttttatcaaaatttgtagcgtttccttcatcattactatccatatcatcatccaggttatcaaatttaaaaatttcaggaatctcattagaatagtttacctttagtgttggtttctctaatgtagtaaatttacgtaaaccaaacatgaaaaatgatgaatttgaatttcttttatttatagaagaacttgatcttgatacaccagtaaaatcggtcaatgaagttattgatttatatgattgatccttcttatctttatttgcatgtttcttattatgtgtatgagcagttgtagtctcttcacggaatggttctacaatgtcatatccaggcagtacttcaaaccagttgactatattacctttagtatttgttgcagtgggtaaataattcgaatgatatataccaccattaattgaaaattgtaatttatatatccctggtggcaaaaaaaggttcttcatataccattcattatttttactatcataatccatggctagtgaatttgtgtctttattaaaaatagttggagacgaagttttttcatttttcaacgaatataacgtggaaacgatatctttactgataataagaattttagtgtttggatcaataccaggtaaatgatccttccattttaatgtgacttcaactgtatcattaaatatacttcccttgatatcaccatcaaaacccttcgtagataaatcttgtgtgtcaccaaaataggttgaagcagatgattttgatgacagtgtagtgttcgaactaatgtattccgacttagcatttttttcataaaaattttcttttgttaagttgcccttatcaatatctgtatcatcttgattaaattgatccttttcatttaaaagattttcatttttttctgttttagatatcctagaactcttggagccaattttttcattaaattttcgcagtacgtctcgtgaataactgcttgccatatcaggaactacggttttattagagatacttgaaatggtcgtactgttcacttctttgttcaacttaacagattcactcttcctagattctttcatttgttgggttttatcaccatataatttcaacataattcttgcagtggcagacatcggttttggttctacggatatattttcttttttagtagtattcttattattagcattattagaattgtcattgccagtaggaaaatcaactgtgttaggtgtcaaaggcgttaaactatttatatttagacttggatctaatcgctttcttttgaagccctttttaagatttgaactaaaaaatttatctttattttgtagaacatttgaatttaaatcatttgaagggtcaacattttcgatatcattattatttaaagataaattggccaaactctgatcaatcattttacccaaatttgtagaaggaatatcagacattatttataatttaaaaccgtgccaaaagaaaaaaaaaatgaaataagaaaaaaataaaaacaaacaaatagaaaggaatgtgaaataataattgaattcactttaataaatacgctttttatctagtataacatcaaccaacaaacgattcactattttttgcctcacactaccacccgttactccttcttaatcctactataaacttagataaatgggatagtgtataaaccttaaaagttattctgtgtcaaactcgtatataagaagtgtatatatacatacgtataatatcgttgcatttatataaatttcttcaaatattgaatcttttgacgtctacattttacaaaaatctaaacaaaagacaaaaaaaaaaaaaaaaagaaagaaagaaaaaatcggacaacggaacggaaaataaaatcgcaataacgaaatattgagggattgacggaatatcatagttccgcacaggtttgacatggctttcatttcttgtcttcaagctagaatcggaaaagagaaaataagagaaagtatatacagattctgaaacctggaagtgggatgaaaagtgttatgaagaagctgctgatactaaatgagataaagaaaaaagagttctatcatagatcaattggaatttaataagacattatataaaacgataggctgaaaaagattttcataacatcatgtgataataataataataataataataataataataataataataataataataataataataataataataataacaaaaatgataatatttagatttatccttgttacgatactatagcctttttcaattcccctttctctagcagtattgactcattaactggatcatgtctacatttaatcattaattcattacacaacttttctacctcatcctcaaaagaaatttcatctctaactttaattctcctaataaaatgcgaacatgatagcgggaatttagcattaaaggtatcattagtggtattgttattcataaaattcttatcatttattattgattgtatggattccttatttagtaaatgtcttgttaataaatcacattttattacagcagtatcatcgttgtagtcatcatcattgtcatcatcactattacacgcactattacatgcactgttgcacacaacattattataattactatcgtcattatacttattatcaaatgatatttgattgttaaaacataccccaccacaattacaatcaaatggtaaaatatttaaattggacgccagatcattattattattaatattatcctttagaatcatatctttgtttgaattttcccatatatctggaaatgctatattatttaaaattatatctatattattattatcaatatttttcacttttaaaatatctttgtaccctttattatcttcaaaagcgttattgaaatccaatacatcgtcgctactaatacttgttaaattatctaatataggaaaagagtcccatatattattattattattattactattattattaccgttactaatattgttactaatattgttgtcaattatatcaggactactatcacaattacttgaattattattactattgctattagttatacttgtagtattaacccatgtatttatcaaatcaaaactattattattggaagataaaggttgtatattattattcaattttaaatccgtattaggtataactttattatcattatcattatcttcatcatgatgattacttctatttatatttgactcttttagattgttgttaattttacttatttcattattaatcagagatttaatatcatttttttcatttaaaaatttcagtaaaaaaagatcatcatcattaaaggatctatattgtttcaaatcatccaacaatcttttcagattagcattaatgaaattaatttcattcagattctgtaagtttaattgttccaaccaaacaattttattctccaaatttttcaacttttgttctttcctttctctatatgcacgttgtgcaattctattctgctgtgttcttttgtttttggattcaacatccagcttttttcttccaggtctgccaactttcctctttatgattggaggatcatttagaatattttccttggtatcaggagcggtagtggtcattacaacttatttttttttattttttattttttattctttattttttatttcttattttaatttaagattgccctattactgttgttcttgttcaatgttatgtatgataatattattggtcatattactggtactctgtatcttaaagataatattgtatttctatgtatatatcaaagcaaaaatcgaaaaaatcaaataaaaataaaaataagaagaaaaagatagggtgtgtataatgtatatgctattctttttttttttctctcgaactttaccgacgcaatgtaacttcacacgaagaagtactaagacaaaaaaacatcagaaattctcttctcgagggataataatatggaattaatgggagggaattacatagtatatgtacatacacatatatatgagtatgctattaaatggtatatatttacccattttcttgcctatctgttagtttttaatgcttttaatgtttttttatgctgtcttgaatagtagaatagcccatggaccaaaataacaatataaaaaatgaccttgttcatgtgttatgaaagaaccgaaattcttaccgataataacatgccatgtaggttcgaattccttatctaatttaactttgatttcatgtgcgacgtctctctccaacgacttattgttagttaatggtgccatcaattctttaatggttgcgagtatttgatctttcagatcatctgacatatctgtagctttaatagtaacatccattattgcttatttgtgtattatttttatatatatatgcgtatatgtgtatatgtgtatatgtatatatatatatatatatatatatatttgtacgtttatatgtttgtatgtttgcgtgtgtttgaaagtataattgaggttttcagttatctaacaatactgttgtgtcacacaaaaagaatctgcatatgccactagcatagattatgtcacctgaaaaaagcaagataagttcccgtcttcttttcttttctttcctcttgtctctctttctttctttttcactcattcctgctcttagaacggaagaacaaaagaacagaatcaatgacaacaccgtgcggatcgccctttgagctgattgttctagaacccagagggtctgggtgtgcggatgtgcaatttcaataaaacattctcttgagtggaagaaaatgaaaaatgaaaaaaaaaatacacaaaaaatgaatagtatttgccacagaattatttggtgtgattatcactctgttacaaaggttgttggatatatgatgtagcaatatcatgttagaatttcgttgtagaaacactagtgtattatcataagtcgtggtttcaaccaacacaaggcactaaaacaggaaagaatatatatatatatatatatatatatatataacattatgtctgatattgactctcgtttgacaaccatctacacaaaacactataataatgatgataacaacagccataatactgaaatttattcacttttccaatccatccttaactcgtataacaataagttatggtaccaattgactttacaactgaaacagttgatcaaattagatcctcaattatcactagatctatacaatgatttcatcctatcctttcttttagataaattgaatcccttggacattgtcaattttctgctattttcccaagataataactatgaacataatttatctgatttgagattcctgctaaatacatttgataagaaattaaatgaattgaaaaataaaaatgaaccaagaaggaactatatcaattatctgtactcaaaccttttgattcacttagaaatctctaaaaaccaattgtatctcaacaatatagttgtcggcaaagattatctaaaccaatttgaatccctgtatctcaataacaataacagcagcattttctatccccgctctaattccaattccaattccaattctaacctgaacagtagtttgaaggaagaacttccgatcttcattataaataagttctacgaagttaattctatatattatgatttgaaaggggactataactcattttacacaacaagtttgttatatctgtctactttagataaaaacaataacaatgtaattggtaaagagagtgagtatgcaaacttaaattccgatctgcaactaaaattatgtatttctgcaatcaaaggtgataaaatctataactttggggaactgttacaacatccaatcttaaaagactgtctgcaaacagattccactgctccgaacagtcccgtcaacccaaaactgaaatatgtcgttgatatcctgatcagtctatcacaaggtgatttcaatagattcaatgaattgctaaaccaagctgctgagccatcatctccataccgtgacttaaacctgttcaacattacaggagaggataatcaaacagatacttcaacattacttttcttaagacagaagatttgcatcatgaccttgattgaattgatctttgttgaaaatttaagaatcttatcattcgaacagatcgccaaggcaactcacctcactgataacatcactgacgtagagcacctcattatgaaagccatttcattgggtttaatcaaggggtcaatcgaccaagttaatcagttggtcactattacctgggttcaaccaagaatcatcaatttgaaccaaatcaaaaaaatgaatgagaaattgattcaatggaattccaatgtccaacaattagctaaccgcatggatcaatatggttcctcaatctgggtataaaccagactaaattgagtcttttgctttttttctttctttctttttttttttttttaaaaatagaaaaacaacaacatatatatatttacatatctatatacaacatattttcagcaaattaaccacacccttcttctcctccacccgtatcccacaaatatcaatgcgtcttatcaaaacacgaagcattatccttgagatcatcaccatgtcatgtggtctgtaaatattgatgtgattctacatccaaaaagcttttgaacagcatttgtcatttctaacgaacgggcagtgtaaatgcacatccacacacccacacaagaagaaaattttcatccaaacaagcccaaaagagaaagagaagagagaaacacgaaggaaagaaactgagaaccatatacctttttttaataacgaagttgaccattttgcttgttcgacttttatttctagagaggaatcgtatccactctattacttacatcagttctcttatctttgtgttcatttttatcttcttatcgagactactaagttcaaactagctaagccagtgaatatcagtaagtatgtctgaagaaaataattctcaaggtgacattccacctccacctccaccaactactgttgaagaacaaccgcaagaacaggaacctgttactgaagatgttcaacaagaagaatctgtcaacatggaaggagaacaagtagagaacagagaagaacaagaaggagaagaacaagagcaagagcaagagcaagagcaagaacaaacacaagaacaagaccaagaacaagggaatgttccaatggaagaagactctaatggtagctcagaaaaaccagaattacaaccttattatccaccacaacaccaacctgctccaccagaaccttatggtaatgaacataactatcctccaccaccaccagcacatcacggctatgagggtcatcctccaactcgtcatccacatgatgttgatagcggtgaattatccacaactagattgtttgttaggccattcccaccagatgtccaagaatcggaattaaatgaaattttcagtccctttggtccaatgaaagaagttaaaatccttaatggttttgcattcgttgaatttgaagaaccagaagctgcatctcgtgctatcgaagaagttaatggtaaatcttttgctaatcaacctttagaagttgttttctccaagttacctgctaagagataccgtgttactttaagaaacctgccagaaggttgctcatggcaagaattgaaagatttagcaagagagcaccaattagaaacgactttttcaagtgtcaatacaagagatttcgatggtaccggtgctctagaattcccaaacgaagatatcttaaacgatgccttgaacaaattgaataacattgaagtcagaggctctgtcatctctgtggaaagagatgacaatccaccacctattagaagatctagtagaggtggattccgtggccgtggtggttaccgtggtggtttcagaggtggttatggtgctccaagaggtggattccgtggtggctacggcgctccaagaggtgggttccgtggtggctatggtgctccaagaggtggatatcgtggaggttacggtggcccaagaaatgattatcgtggtggataccgtggtggatatggtgctccaagaggtggctatggtgccccaagaggtcctcctcctccgatgggtgattacggtgccccaagaggtgaatatggtaccccaagagatccttacagaactagagatagtggtgctccaagagaacattctccaaccaggtaaaagaagaaacaagaaaggaaaggaaaaaaataaacttttattctctttctcctttctattttttattttttatttttattttcaatttcatctttcattttttatttctagtatagactattattatctttcttccttagataaaatatgcctatttcaatttatttctttggcttactcatatacaaacaaaaaaacggaaaagaacaaaagaagaatatcaagaagtggtgttgaaaaaacttttattctattttattctattttaaatttaaatttacattagtattaccttttgttttagatcccctttccccagtaacttattattactattattatagtcattattaaacattaattaaaattaggaacaaatatatatagtgaaatttagaattttattttatcttattttttatactgtgttaaattatgtgaaagtgtgtgatacttcttctggagcaaatgttttgatacaatatctgtaaccaagaaaaacaagcaaaatatacaaagttcattttaaactctaagtactgaaagaattaagaactttttttatttgtgctttagagtgtatttgttatccttttagtttggttggaatagaagtattgtatttccacctatctctatatttcattccagttgtaatataaaattataaagttgttaaactgcaataaaatgttcaaacacctagtaattagataatactagcaaaaacttataaaatagttagatatacagtaataatagaaaaaaaatcaaataatgataatggtggaatatttgtacttgtgattataaattcccaacaactatacattttaaacaatctaagaattcgcttagttttgataatagtaatgcctttttagataattgaatccttccctaatatgagtggttaaaagggtaatgaggagatgttgacacttcttgtgaattattgtgattattactctgtatgaatcatatccttattatcttgacataaaagattaaaaaaagataaatttgtcacctattattgtattttcctttttgtttgtacccacgtagcatttttgctaacttattattgtcatcatcattatatactgtcatcttctatgtctttattctaacatgttaaatgtgtgacaagatatgcaagtgaatagagatataaagagtaaaacatattttgaatcttgcacacgaataagtagttaaatatatcttgtatgaactcttcaatatacttttgataataagtttgatagctttttcttatgataactgtcattgtgtcatttcttatttcgtgacgtctgtattttgtatggacatttgttattttccctctttttttttttttttttttgttttttgttttttctttctttcagaattcgccaaatatgtttgtgaactacaaacctccataatctgatgatgatattaccaactactgattaggtgaaaaacttgagtactgcagcctttgaccaacttttaacaaagctttttcgtgcaacataaccaataattgcaccattcatttttttgttaattatattaacaacttttttacctccgctctatagcctttatctctattttcttttgattgacgatcctttatttgccaatggcaactacattaagactaagaaaatctgtggcagtagtatttttggcgctatatatttttattggtataccgctttggtataaattaaccaacatatatagagccatattgcctgttgaatatatccaaactttacatgatgctaaatttaaagagatccacttaaccatccctgtattcatcaaatctgatacatatcgattcccagatattcatgatgccgtacaagtccaggtcaattatttattaagatccaaaagacaatatgtggactggtcactagaaatattcccatacaatgagactttaattagtacagaatatgattctaatcgtgataattatcatgtggtagatttagtacttgatgaatttataggatatagtctaccttatgattctatggtcaccacaatatactttaatgatgaatctgtggcaagtaatgatttacctttcttcattgctcaaatcttagtagaacatacattccaaattgaatataatcaatggattttaaaacctggtcagacagaaccaaatcaatataatagtgttctcgattccgagcaatttgcaataaactacactcctaatattcatttaagtatctctttattaaatggtaatggcaatccggtatcatgggaaattgataaaagcttaacaaagatttttacacctttcagagaattaatatctccattatataatttcactgttgatacacagatagatcattttaatgatttgaatctaaataaattgaaccaaatcaataatcctacatggcatgatttgtcccatattattgacctatcagagctatcatcaaataattattttgtcgaacaaaatgccattaatttagttattgtttttccaaataaaaataatgatcttaatggattaaaaattttacatgagagcaataataatgacagtaatagtactatcactgctgctccagttgagtggggtagttttgttgtacctcgttgggggattttaatcgtaaacaagtcgtctttagaagcaaactccttaataacagaagaatatttgaatccaatattattgaaattcattaaagatttactaagtttcttgggcattgcaaataacagtaataagggaatcaatgctgatgataaagattttgaatatacatcaccatacttagtcattgattcattaaagaggataagaattatcgaaaacttaaataagtcgattgacacattatggtctttggtgaaactaacaaaacagtttgaacaaatgactgttcctaaagaagtcctacaagatttgactgatgcactagatacaaggttagagttgattgatttattgaataacccatctaaaggtagtgacaaagattggaacaaaggtttgattatgagtaaccaaattgttaaaaattgtgaaagagcattttttcatggtgaaatgttgcaacaaaactttttcccacaagaacataaattggcagtctatctacctttattggggccattgactgtagtgatattatctggccttaaagctgtttttaaagaacagcacgacaacgatgaaaattcgaaaaaagagaaagataattaaatagaggagaatgaagctttacagatatctacatgtacgtatttatgtatctgtatgaacatatataactttatataatcaacataatctagataataaaagatataaaagaaagactattatttatagatgctctctattatatctaggcctgtgaaaaatgtactttagaaaaagagaaaatgaaagtaaaggtttctgaggaaaaacaataaatgaatattcttcaaataacttaacaacggcatatgataatatttaagtaaagtattaaaaaggaaagaagtagtcaagactaaagatattagcatatctgtaaatatatttaggtgtttcaaaacaaacgtgtacatttacctgtgagagtttactactagcaacttagtaatttctatctgacccagttaactattttcttatataaatagcaccataaaaaacagtcatccatgtctgatataccaccacaaggcccattagatactataccaaagacgaattatccgccacttttaacgccagcaaattattattctatcaagcaaatgattgaacaaattatctcagaagatcaagactatgtatcgtggaaaattaaagatctcagaactggcggaactatgaatacttttgttccttctgatataatacactataaacctcttcgaaagaaacaaattaaaataccctctactaccattaccagcactaataatcagataacaacaacaggtgataaaataaataaagtacctcaagggctgacatttattcgggacatatatgaaaatcaaaggaatgaagaatttgaagaattacaacctattgaggaattaagttttgaagaccagtttaagttattaatattaaatttggatgatgaccaaaatagtcgatttgaagtgtttcacagaacatcgttgaataaaaatcaagttaaaagattagctagtcttgtctgtggacagaatataactgagaatattagggttttcttacaagcaattggtaaagtgtttgctggtgagattattgaattgactttggaagttagaaagaaatggttcataaattatatgatttgtcaatttgataaaagaaagataattggtcatagattaaagaaatatttaaaaaaattgactatattagtagaaagattaacacttgataaaaatattaagagtgattctgataactatcatactactactaatagtaataatagtagcagtaatagcggtaataatcatttgcttacaactttagaacaagatgaaaacgacgatattaacataaacgaaagcgatgaatattttgacgacgaagaagataatatgaaagagattcaaaagggcaataaattattaaaagaagataacaagaatacaaatgaaattagagtaggcctgattgatcaatataataaattagttaaacagtttaattcaacggatgtcagtatagaaaggtataataatagcccaattttacctgaacatattagagaagcatggcgactataccaactacagagtgataaacatgtttcaggacagtggagatttaaaggtgaagcaaacggtgaattgtttcgttaaatgagtatctactaatgtttattttccctttcgtttttgatttatatatatatatgtatgtatacttttatatattaccaccgagcattcattgttacataatgattttgcataattttcaattcttcaaattcatctaaaaactgtaaggattgcaatctttttaattccattggatgaagattagaatttaaaaaatcccacatgttttgaatcttaacatctttataattcttccatctatttgaataactttcttttgaattatataataacaaagttggtaaatccaaatttctagacatcaatagattttccttcattataataccgaacctattatcgctattagcgccgccgataggatcatatgatatccataatccagaatcaaaaactgttcttattgaatcaatcaaatcctgcgactctttttccttgatataacatagtgtacattctgtgatgaaaattgtgggaatcttaacatcaagttttgattttaatattaacagggtgttgtctaaatcatttaaatcagaagccactgcttcaaatctaccaccccatgtggtatcaatcggcacaagggaattttgggaggatgaaatagattttaggattgattgtttcaactctacagattctttaaaatctaaatcaatatattttattacatgagggaaaatatctttgttattcaaaatttgcaaacatcttaaatcagaaccacaaccgagattaacaatctgacattgtttatgaatgaggttactgttgagatattgtaataatggtatatcaattgataatgttcttaaataggtaccatagttcatcacaggctgtgagctttgcatagctcttgtaatctttaagaatagtcttttgccctttaaagttgagattttgatagtattcaaatattcaaaatataatgatttataatcttggtaaaattggtcccatttctcgatgggatcaattaaagcttgcctgtttgtcggtaaatagccctttgagatacaggccaatttagctgagaaggcatcaaaatctgtctgttgaatagattgcatagtattgtgtctacacacgtattacatatatgtacaaaaccattggatatataatgaatacccatccacctatacatacataattgatttcaaaacactattcaaatgactcaagtctttcgttttctactctcctcttctcttctcttttcttctctcttctttctcttctaacatcacagttgttattggtaatgaagagattacaaaggggaaacacacttaccctacctacagatccgtacactcactctgttgcagtcgagaaaccctcattttcttgcactcctgccctaaacagaagccctagggtttggtaatttttcttttcttttttttttttttttttttttttcttaccttttaacgtttaagaaaaattgaagaaagaagatttagaaagatatgaaaaaaaaagaggcactcactttcacatagatacaagactatccatgtacgtgagtgtgtgggctttgtagagcatttggatattataagtctacatgattctttctgactaggagaccgtcggtatttcagtatagtgtgaaagagaaaagggaaaaaaagagagaaagaagtgtgtgtgtgtgccaaaaaaaaaaggaaatttttcaataagaaaaccaaaaaacatatttcaatagcatttgcatttgcattttattttagtttttgttttattttattttggcctcttagaatataggtatcgtacatatttcaatcaaacaattatattagaatagattatgggtaattcaaattccaaaatatcttctaataagaaaattagtcataatgtaactaataaagataatgctgatagtagtataaaaagaaataaaaataaatttaaacaaactaaaaatagttatatatctaataatagtaatgataatgattacaacacttctatagcaaaaggttcaaaaccgaaaacactcgtaaaaaaaacaaacaggcaaacttcaagtaacggttctagtcatgaaaatgtatttaatcagcaaaatacatttaatcctgttaacttggatcctgataatacttctaaacctatccaaatttatagaactgaaaccatacattctggaaaatctttaaaatctcgtcaatcccaatcttcactaagaactaacaatggatctattctgctaaaatcaaatggcaataacaatacaaactctacaacagcaagcccctttagtgttaccaacaatatgaataattctactagtctaccgtcctcttctagaagacgagtcagcaatactcacagcattaataacgaaccaatgacaccaattttaaaaaaagtgggtacaaatacatcaggtaattcaccaatttacagtgagtatgctatcacagatgatgataacgatgattatattaatacttccatcgagaatccaaaatctaaatctaaatctaagtcaagacaaaattcttcttcctctacatcaaaaagtaaaaaacatcttctctccattaaacgtcataactctatgcatgatataagaccgtctaatgaaaacacaaatcaaacagatagtattcataataacaatttattaataaatgcttcacagttcagaccacgtagtactagaaaatctgaaaatataggtattcatccacacataaaagaattattatcaggatcagataataataatagtaatagtaataataataaaggtctaagtaataacagcacatcagttgataactctatcactaacagtaatagcactagcgctagtaggcgtggttcaaactctgctagtgcttcgattagtggatatacaatctatagtactcctgttcacacacctaacattattgatgaaaacaaaatgataaatggtaacttagatgatgttgattattttaatgtaaaagttagtagtaaagccaaaatccctaaaaatatgcattttgatgaagaggatggtgaactaaatttaaattccaaatcaagtgatggtgatacaattgttggacaatcaataacgaacgtaaatagttctgaattacagggcgatatgccgatgatgcctaaaaagaaaaaagtagttgacattgataattgtatcgaaagattaattgatgcaggatatgcagccaagcggactaaaaatgtctgtttgaagaattatgagattgcccagatctgtagaatggcgagagaaatatttttatcacaaccaacattactagaattatcaccatctgtaaaaattgtgggtgatgtgcatggacaatattgtgatttactaagattattctccaaatgtgggtttccaccaatatctaactatttgtttcttggagattatgttgatcgtggtaaacaatcattggagaccattttattactattgtgttataagattaaataccctgagaatttttttcttttaagaggtaaccatgaatgcgccaatgtgacaagagtgtatggcttctacgatgaatgtaaacgtcgttgtaatatcaagacgtggaaacatttcattgatacttttaacacattgccgttagcagcaattgtaacaggcaaaatcttttgtgttcatggtggtctgtcacctgtattgaattcgatggatgaaattcgacatgtgagtagacctaccgatgtccctgattttgggttagtaaatgacttactatggtctgacccaacagattcaccgaacgaatgggaagataatgaacgtggtgttagttactgttataataaggtagcaattaacaagtttttaaataagtttggatttgatctggtttgcagagcacatatggttgtggaagatggatatgaattcttcaatgacagaagtcttgtcactgtattttctgcgccaaattattgtggtgagtttgataattggggggcagtgatgactgttagcgaaggtttattatgttcatttgaattattagatccattagataaagctgcattgaaacaagtcatgaaaaaaggtagacaagaacgaaaattattaaacagtggtcaagacactagcattaataataataacaacagtaacaccaacaccaacaacagtaatagttataataatataacctcttaatattactgtagcagtcttcgtaaagaacaacataaatttacatcattcaataatattatatatatacatatatatgcatatacatattccaatacctttttatttatttttagttgatactattaattgagatttaccatatataacactttccaattctctttttaatttatgtgattttttaacaactttattttatggaatacagaggaagaaggaaaaacaaaataaaacaaagttaaaaaaaaaaaaggaaaaaaaaatataaagtagaagattttttgaagtattaaacaatacaaatcaatatatatattagaaatagtttcatttcatatcatttaaagaaaaaaagaaataagagatgaagatctatagtcaaacaaaattcttagaacattaccaataatgagacaaagagagattaaacctccaacatcatcagactattatttttttgttcatcactttattgctactttgattttagtaacatgtattcttatatcagtgttaccaagagatgaaccttcaagattaaataacaacaataacaacagcaacaacaagtaccacaaaattttacagtttctgttagatttactaccggatagaagatggctaatatggagtgaatgtttaggattgatgggtatgatgtttgcatacgttggattgaatctgtatagagaggatataatgtctccgagcttggatgattttagatatattacagatggaagcagtaatttagagatttcgataaatgagccaagcaataaatatctacatgaacagacaattggtgtggtggatttgccaataatggatgtttgtcaaattttgtacggtgcaaattgattattataccatgaggggaaagtggaacggggagaaaagaggggcacagacgaatcgaacacgatcgcaaatgttacacaattcaaaccaattgaacaagaactgtagatcacgtgccagtttccacagttttctttttttttaatttttttcttgggagcagtaaaaagttctctctctcattttttgttttgctctcacaatttttacaaacaaagggggggagagtcatttttgtatttttttcttacttgttgtttccctttttttttttttttttttaattctttccaaacctgttcgagttaaatggctgtgcggcacgggtgtacacagtttttatttattttttttatttgactctttttttcttttgtctgactagtaaacgcaacgtatagtttattattctcattgttgttattattattgatatcagtatgtggcatgaaaagaacacagaaacaaggagactatatcattaaagatagtgggtagagttagtaaagaaattgtgtttacaaaaagaggatgagaataaagtatagaatggaatacgtttaattttttttttattattattctcttttatttgctgattttagatcatgtatgtatttaaataatgaagcatttcgagaacaagccttatgaagacttcaactttttcaaaactttgagtgtatcctgtttcgtataattatatttttacttttacttttatcatctttataattctctctaatcaaagagacataataaagaagtgactaaaacctggatttcaaattgttttaatttttttttctttgttttcctttttgcttatctgaagttgcattataaatttattgaatattaaacatacaaatatacatatatatatatatgaacataaattatgaaaatgctgagatatataaacttatcaaataaagataataattggtacctgggactgtttatgttatttatcgtggttgtggcatgggtatcatcgtcatttttattgaattctatatttgaatccaactactacaaaaaacccatatttatcactttttgttctatctcctcatgttccttatatcttttgcccctcttaaaacaactgataaaattattctggaataatggcggtcactgggatattcaaacagcctacaaatcgcaatactacgcacatttaattgaaccagataatgatagcgataatgaaaaatttgatgaatctaaagaatgtcacagttacgataatagcgctggtgacaatgaaataataccactgtcttctattattaagttgagtatgatcttctgtactctatggtttgctgctaatgtaaccaccaatacctcgttattatatacttcagtgacagcacagactatattgtcatcaactgcatcgtttttcaccttattctttagcgttataatgaaggttgatacaatcaatctttacaaacttattgggttggctatctcatttattggtattgttattattgttattaaatctactcctgtatctaatcagtccgatatcaatcaattttcatatgcaagtatcgttatcggaaatgtgttagcattggtaggtgctttaatttatggggtttacagcacattttttaaaaaatctttagtacacatttccaataatgacaatcgtacaaataatgctggttcaagtaagatcgacatcaggttatatctgggatttgttggattatttacatttattggattatggccaattttagtacttttcaattattttggctgggaaagtttcgaattcaaatgggatttcagaattatttcaataattataatgaatagttcggttactttcctaagtgactattgttgggctaaagccgtgattttgacgtctccattgactgttacaataggtttgagttttacaatgccattggctatgtttggtgatttcatattcaggggtaaacaaatcactccatggtatatagtcggctccattctgattgtattgtcatttattttaatcaatacaagcattgatagtgatggcaatactactgccactgccactactattactgcatcctatactaacgatgttgataagggccaacaacagttattggctgattatggcgttgaatcatatggtacatttgaagtttaatagaaaaaaaaataaaagagaggggagaaggaaaagcagaaaagtcttattgttgcatatttgtttatttgtttgcttatctattctctttttggttcttcattatcatgaacaaacacatataaacagacaatcgatacacatgtctatatctatagtagtatgtacgggtatatataccttggaccattcatattaaataataataatatattctttctagcataatatcatgtcaattattacatcaaaaaataaaaaaaaaaaaatagagacaaacaaagataaaaataatgtgtcgtttctttttcttttacttttctgtctttttttttattttgtttttttagatttcttgccaacaaaaaaaataaaaagaattgcggtgagaaactctcgaagacttgaatttctccattgagaactgaacagcatcaaaagattcatttgatctgtcgcttcaaagtgaaagttaggtgtggaagtggcagattcatgaaagtagcactaaattattgaattgcatgggttctttgttccgtactgttctatgcaaaaagtattataaaaaaaaggaaagattagactgtttgaaaacaggaagcaacgtttatttaattgacaccagtggatacttggctttgtaaaggataccattttaaattgttataaataaacgtaggaaaataaaaaaaattagaagtagaagaagtatgagtaatatattgcaactattaactaattattataaatctgtaatagagtcagaaagaatctataatgaatacatatatttacaactaaggaaggagcaagatgcagaaaaaaagaaagtggtgaaagagtcaatggatgggaaagacaataccgatacgcccaatccaaatgatttggttgcattacaattacagaaacaaatcaataaattatcatcgcagatacagactttaactaagcaaaatgacaaattaaaagaaacaaacaaatcacaacgtatagcatcagaagagaagattattactttgcaagcgatagttcaaggcttacaacaaactgtatcaacgcaaaataaaattaacagtaattccaacaagtctaataatactaatgtcagtaccgttaataatcactctcaaatgagaacacccataaaatcaaatgaggagacatgctctaatgccaaccatacgaatataaataacaataatagtaatgggcataaatcaaaatttcatttattgtcacctttaggtaaaagtatctcgagcaaatcacgaagttctaatcatacaatatttgatgattccagtagtgacagtgatgatgatgaagaaaaatatgataataaatgtaataatgataaacgttttttaagttcaagcaataaaagtaattctaaagaaatcgattcatttatattatcattgaagaagtatgatgaaagcagattgaatgaaaaattagaggaaacactaaataataaaggtaaagatactgttattacaaataataagacaaacaatcaagataagataaaaaataaaaaaaatggactaagtattacaccaactaaacttcctgttaaaagagcaatcactaatgataatagtcaaaacaagaacattattacacagaaaaaatcaacaactcaagtcttaaaactaaatgagatagatataccgaacttgaaaacacatgattctaccacctccaagaaacgtaagttatcaaacaaaaagatacaagtatcatccgacgatgaacagttgttgcatctggaaagtcagtaatctatatatatatatatatatatatagatggatatatgtaagcatacaatataaatatatatatgatgctatcactaatatttcatgcataaatatttgtttctgatttgtcaacaaacttttgaaatttacaatttgaatttttatcaaaagaaaaaaaaaaagataaacagaaaaaattcttcaaaaattaaaaaaaaaatggaaaagaaagcttgtcaatttgaaatacacgaagtagtgattagtatatttacaagtcatcacgtttggaagtaaatgcctgtttagaaatttttatagtatacatccacctcataatactaaaaagtcattattcctgatataagcagaaataataagtatacaatacaaaaaaaaaagaaacacgttatcaaatttataatatataagacgttttagtagaatttctgcagagtgcaaatttttaatttaatataaatacatatacatttgatattcaattattaattattattttcttttgtattcaaatattttgaatgggtatggatttaaaagatacacagaatagtaaaacaatccatccagatcctaaagataatagccataataattttgttatacatgataataaacacacaagaatgtcatataatgggaaaaggccaataactccggttgatacatatcctaccccggaatctggttctctttcggtggatagggctggtgaatcagttagtattatagatgattctttcacgactaataccaataataacatagaaccgggaattgaagataaaaatgtaaatgacaacttacttaatggcagtacagattctgtaaaagttacgttgaatgaaaaatccaagaagaaaaagagaagtgctgcaagggaactggaatcattattggaagatgctagtaggtatgatccaaattttgaatattctttacccacttcctataaaaggtctaaaccaagaaaatattatttcaatggtgatgggaacagttatagttattatgatgatcatccaaatataaaagatttagataaaatgggtgaaaaatttattgtgaaacaaaaaaaaataaaagcaatagcagaagaagagagggaaaaaattgttaatattaccacatctaaacagaaaaagcataaattaatacaagtcagtaaatcaaacaagaagaaacaaaaaaataatcatattgaaaatcatgctgatataaatactaattcatcgaaattaaacaattttatgaaagatttagatttacaaaagttaaagttaactaatttgaaggctttttccaaaaagaaaactgttgttaccattgaatatattcatttgaataagaaggataagaagtcaagtattagtcaacaatctaatagaatactgtctaacaaagaagaagctcaattaccagaaaacgaaagtaaaattaataatatttctgataacaattataataatccaaatgatataatactagataataccagtgttaataatatttcaacatttctcaattgggatgctccatttattgatatatgtaacgatttttttaatataactgcttgcaaataccaaaatttttcaatagcacaaacttgtgattctatcacagttactaatcatatcgacagttataagaaaagatatcatcctccgaatctagaaaaatctaaagggtacagcaataaaaataccataaaaaataatagtataaaagatcatgtaattagaaaggattctgacgatcaagcttcaatgaatcaaaaacaaatatcttatgaagatcttgtggtagagttgcaaaaccctctattttttaacaaggctgaaaagtttagagtaaatttttcaaaggatgtttcgagatacaacccaatggttgaagtaggaaaatttatagaatatgttgccctaatttatctacccgatccatattctcaatcattaaaagacgatataataccaaaattaaatgaagcatatgatatatcgaatggtgaatattttgttgggatggtaaaggaatataacaatttgattcagaaagtaccaagatatgaaataattaatcatttaaaaagtgtaaaaaaaataccggtatcatttatacatgatattttgcaaactgtatatattcgaactatttatccaagagctaatcaattaaaacattatgaagcctttagtaattatgtttatggtgaattattacctaattttttatccaaaatttataaacagtgtaatttaaatcaatcgagtatttttttagatttgggttcaggtgttggaaattgtgttattcaagcagcacttgagtatcaatgcaagcttagtgcaggctgtgagattatgaaagaggctagtgatatgacggaatatcagcatagagaattgcaagaacgttgtaaaattatgggattaaatttaagtccagtaaagttcttcttaaaacaaagttttgtagctaataaagctgtagaaaatattataagagattgtgatgttttattaataaataatttcttatttgatgcagaactaaacaaagaagttgaaaaactgatacagaatgttaaagtgggctgtaagattatttctttaaaaagtttaagaagacctggttatgttcttgatttttataatactgataatatattaagcagattgaaggtcgaaaaatttaattttgaagaagatagcgtatcatggactcacactggcggtgaatactatatctcaacagtcttagaatcaattgatgaatcacttttagatattaaaagtagatttagaaagcttaagagacctataaaatatacaagatgagaagctgttgaataatatatatatggaatgtatatatgtatagaaggttgtagttttaaatcatattaatattctagtatttaaataagttctaattaaaaatatgtatatttatatatgtttaaggtatattatatactttaagctagtgggacgatattacaactatttttcaggttgagattcgtttaaatcaacttctatatgcactaatgtgttcatcaattttttcactgctaaaatatgccatgggatatgtgatgttctcccatcagaaacaccaaaccatatacttaaagcagcaaggtttctaaattcttctaagacaatctcgagtaatttagtactatctgaatgtggacaatttaacaaattaacttccaatttgtcccatatcgttttatcaccagtcacattaaatctaactagggcaccactttttatagcacatctatgttgagaattagataatggaaatggattctgaaaaataacaccatgtatatcatcgtctatgttaactacctcataattatctaaattagaataatcaatcatttcaaacaatttaggatttctaacgagtggtttaaagcttggatacattctatccccatcataaaatgaattttttgtatcttcatcaacacaaacaacagctagatgaatactcctacttgacaatctcctccaattgattaattcatcatcaggtaaaataccgttcaatctagttaaaatcaaacatatcttaccgtatttcttatatgccaattgcaatgccattgtccataattgtgtacaagcatcatcaaacttctgtttagaattcccgacgtaccatgatttaacactgttagtttttccatcactatcacttaacgcacagaatacccactttttgtcaatgcttctagagtaggctatatggatataagagtcataagttatagcacttaatccatcattattttgaaaggttttaaaagatatcttacttggaagtttatgtgcaattgcagtaaatttaatatcttttggccacaaaatattgtaaatgctaacacaaagattgtaatattcatctattgaagttaaagggttttttatgaaatcatgtggtattacctttaaaagcaagtcaatatgtgggatcttggatcttacttcatctctaatgacttgaaaaactttgagattagataataaacagttgagagtgttaacttctaatggcaatataatcagtaaagttgcatcttttcctaaattcttactagtcgagcaatatgatacaatttgagcagcaagaagcaataattcactttgttcaaatgtttttaattgaattaatccacttgtatcggtaggtgtcaattttagcaattcacaaaacccaaattcataattaatatacgcttgagataatgtagatacaaacatttcatatacaatatctgatgaatcggtcaataaaaaaaatttgaaatttttattacccatgggtggctttaaatttaaaaacttgccaaagggatgagaatcagacttaattttaataatttcatgttgctttttgataaatacgaaaggttgtttcattctgtagattttattaaccaatccaggtccatttagagcagtaaaatatggaaacatattctgcatcgtgtttgaaataaaaccatctgaattcaaaattattttatcataagtaacacatggaatattcaagttatccagtaagtcattatcaaatacaatttgttcacaaataatatttaagatatctttgtttgctgtcgttatttctattttcggattagaaggtagatatatatcaggaaccaaagaaagaggaatatgtctcaacaaaaatggaagcgtattaaatagtgggcttgtttgatagagattagtaaccggtaaatttgaaacaggtagatcttctgattttgctatatcagataggcattctttaatctcttcagtagatgattgttctggcacattatctgtatctatcacaaaattagaagtagtaccttttattggcgataaattttgttcattagttggatgtgaaagtttccaaattggatttgaagtatccctagaatatgactcagcagataaagaataaccaccggatatcaaagacggaggaacagactcttgaacacctagcattggttgatagtttaaaaattgcgtatcatgtacactaccatcaaataatttcagttcttgtttaatattattatattcaattgattcaaaactcgaatcactttcgtcatcttcaccctcatcatcatctgaacttgacacattactaacagatatatcaaattttaatgcttcatccctttgagttggactaaatgaaaacttaccaccatttttgtatttattatcaacatcactttcaattttcggattaaaagttaatggagcaaaaacactttttcttttatctcgaggtgtttctattggtaaaggtgcacctggatctgtgtaaagtggactatttgataacgtaatttcttctaatggtatatctaaatatttacgttttaaacttagcttgttattttcttttttattctcattattagaaaatgactcattagcaggatgttcctcgattgtacttctcatattttctcgcgagttatcttcgtcatcagacatgccgaacatatcctccgtaatctcatcggaagtagctttttcagaaacgtgttttttttcttctatagatgtatcattcatttcaccaaaaagatcatcttcttcatccatatttgacttgttggcagttattttgtttagtttactttgattgttgtcagattctttattgttgattaatatcaacttagaatcctcatcttcgtcatcctcaccaaataagtctttatcattagtatcattgttgtcaatgttgtcagattcatttaatatttgtatttctgtagtagtcataacgttttctaatttatcgtgagtttcatgaagttcttggactaatcttagattttctatgtttaattttttgtcttcgatactttttaaaggtgataaagaagaattatctatctttacctttgtcttctctgtggaaaataattcattgttattgtctaaggtagtaataggtgtcatagaaaattctgtagaaaaagcatcattatcaataggtatattcttatccatagatgacgtcaaggatggtgatacgtttgaatatgaatttgttggggatatcttatttttgaatgattgttgaagcattgaaacacctgtgtttttataatattgttgaaattgttccgtatatgcacctcctgagctcagtgggttcgtatttaatgtgcctgaactacctggagttctcagtgctgcagtttgtcgtatttgtatgaaatcatctatagtactcataacatcatttaaattgtcaaattgtatatctgtatcattaaaatttagttcgatatcattatttgtagaagtttcattaagaatattattgtctctaatattattgctattaatattgttttttacatcatgaatttgaacaaagcaaagatctaaaggccaaataatttttttttcattcttagcagataatttattataatttgttatacttggagtatttccatttaaataatcaagatctggcatcaccgctatccacttcaattgatcttttttcttcaatgttattccatgggaaatttgcaaagctcttaataatatatccgcattgggtggcggtgcccataatttaggtgatttagtaaaaggggtattcaaggaagataaaccattctcagtaagaatcttcattctaatgccagaaggtgctaaatagagagaatgtgccaacaaaaatttctcatcttgtaagtgttcctcttttaattttattaaatttaaatcttttaagcagacagatactgcaagtatactattagcaaaaagatggggttctatttgtaatatcggattactattgatatttgtcttactaccgtttgtggacctgaactttacataattagaaatgatttgatggttatctaataacgatatacatccattcccatactgaatcaaactactatttgagttaatactcaaattaatataaatagatctccgtatggcttttaagaaaagtgcataataaggaggtaagtttggttttgaataatctgaattaaattcgccgcattttactggttgaacatattggacttcaataggacttgtatcagcagtaaaattgtttgtgaaataattaatactttgattaaatatatcaaacttggacggtaatttcggtaaaggatcattatttatactaaaacaccataattctcttgataacagggctaacaaaattttaggattttcctttcttaaaaagaattccatataaatggaccattgatcattttggtttggtggtgaatattgggcataattaattttttcaatgtcttgtattttgtaaaaatttgatatcagttcatctagcctgtatttatctgtaatatcttctatttctatcatatttgttaatttgagtagttccgaagatggctatatcttttcactgtatatatatattattattatttgttggaaataaacaacaattaaagttgctttattgtaaaataatctggtagaaaatattttcaatattaatggttgaaaacaaaaaaattaaattttactgataacggttaattactaaacagaataaatgaaacgtcatctatatcatcaactatattgtactgtaaaaaatagtacaaattctacaaaataatttcagtagatttttaaaaaaatacaattttttgattcctagaactcttaatataatcactataaatataaccagttggttactttcttttgctagttcttcctccgaatttttcttttaaatatatatcacttttatatattattgtttgcttgttcacagattaaagatttatcataaatattgcaaaatatattgaaatttagaaaatccaaaatttgagctcgaggaaataaagaatagacaaaaagaacacaaacaaataggtaaatcatcaagtcagaataaaataagatagtgtacagtataacctaaggaaggataggctaagagcttatacgattttaatattgtcgttttgtactatttttctggtttcactcactgttaaagtaccaaagaaattaagaaataacgaaaaaaaaatacaataaaaaccaattaaattattagttacctcaaataagaaagtcagaagaaatcaacaattaaattgtgttttatttgttttatttttatttgtatcattattattacctaacttaacagttcagtatgttccagtctacttacgaaaatggtaaattattatttaatgaatttagagagcacaaaataggtggaatgtcacgatttaaaatcattattaacagaaatcgtttaattgaacaaggtatattaaaaccagaagatcaatttttacacttaagaattaaaaatgaagagagcccattgctacgtggtgtttggattactgggccttattcgtactatgttgatatgagaccaatcaattatgatgaaaatattcgatatgaaggcaaagaacccattgaatttatggaaaatttgaaacctgatcaagcatttaaagcaacattaagatttaataaaggaagtcaagttgagggaactgatggaacatattgttggattgtagatatcttatctcaattagcattggtatcatttgtagctataaaattttcaattagaataggaacgtcaagacgtgttacaaaaagcaaaaaatctagacaagttaagacaacgattttagataaggagactttcaatatagaagaatgggatgaaaacacattatggaacttacctcctaagtatggacataacaagtctgtccatttagtaataattacacatggtatcttttctaatattggatgtgatatgttatatatgaaagataagattgaacaagtgtccaattctgtagatgactccataaactcaaatgtgatcgttcgtggatatatggggaatatgggtaagtctgaaaggggtattcattatctaggaaaacgagttggagattatatcttaaaattagttgaccaactacaaggagaagaaaaatattgcatagataaaatctcttttataggtcactcattaggtgggcctacacaatcaatggcaattcattacatccaagtcaaaagacccgatttttttgaaaggattcaaccaataaattttattaccctagcatcaccataccttggtgttattggagatttccctttctatttatcagttcctttagatatgggatttttagggttaacaggtagagatttgaatttaaaatatacaccatttcaatctaaagacggtttatatatagaggaaggcaatgaagcgtttcctaggctaatattagagattattccacatgagccgatacgatctatatttgaaaaatttactaataggaccttatatgccaatgtagtaaatgatgggatagttccattacgtacggctgcattgatgtaccttgattggaagggattagctaatgttgataaagtaaagcataatgagaaacctgaaagtaattcacagatggaattgagagaggggtcgcatatatcagagattccaaaagaagaagacatggatattaaaacatcagagaggttgcattttccgaatctaataaaggaagttcgaagaaaaaacaagaaatttgggcgtgcacaaactattgatgttataaatagtaatatagaatccaacaataaagatgtatttaaatatgcaccagatgaagcgtcagcagtgaagtccgcattatccactttaacagcaccaatcccttcacaggaatacattaaaaatccagaagccagaacagatagtataatacatgatagaatatatagaccggaccaactaccaccaagacattatttgggtagaccaatatataagaaaattgtgtacccgaacgaaaatgttaacagaatacaagagagaatagcgcgtgaatggcaagaaacaatggaatggagaaaagtattagttaaaattcagcctgactcacataacaatattgtggtaagaagaaggtttactaatttatatggtaatgttgctgtgacacatatggccaatgaacattttggtgtaaaggcatgtgaaaaatattcgaagactttaataagataaaataggggaaaacaattaaaatagatacttttccattaatacacacacacactatatatatatatatacgcttgcatctattatttatataaagagtatattatacattaaactcaatatattcatatctacctgaatatgtttgtgccgatgtgaaggatttatatgaaagtgaatttattgaataaagtttgatttgatctgatcaaagtcggacattttccggggaaataagaatatggtaaaaaaaaaataaaaaaggaaaggacttcgaggaaaaggggagctcaacttttttagtgctcaattgcgaatgcagttacccacttagaatagtcaatctaagctaaatgaataaaaatgtatgaatacgtagaatgtatataggcgtatctataggtaggtgcatatgtgtatattagtactggtaagggctaaatatttaccatcttggagcttagccatactttatagttcatttcagcaatatgatctgcaagattatacaaattgtcattagtttcatgatttatatcgtatagatctttgtagtcaactaaaaacgaagaagaactatgtcgatcaactgcacacggttcagaagacttgactaaaggagatttcaataattcatctatgttattggtatatagttgcaaagagcagagacttcgatcctcatctttatcgcactgatttgtagaagatagagcatagtgcgaatccatcagtaatattataagaaaaaagaataaataaatgtgtataatatgtgaatagccaaataaaaagttcagaagtatgtgtgtatattaacaactaaaaaagcgatactttcgtagctatattaaagtaaaaccatgcaaatagcagtattagtattttgttaaaaattcatatattgattatttgttcaaacgtaagataagtaaaaagaatttgaagaagacaaaatgaaagaaaataatcaggggaggggtaggattgtaaatgaatatcacctttattgataaggtgccaaacgtgtcaaaggaacaaatatatatttatatgcctatatattacagcagattaaagtgtgccaagaacttaaaatggataaagaagaacagaaaaagagcacgatgtgaaagctgttttcaaatgtaataatagtaaaaggaaccttttttagatttcgcacgcaaaaactaccagcaatagcatgagtaagttagtaattactgtagcagtgacaaatactttcaaatatgtggagagttggtaagaaaaagacctgggaggagacattacacgtagggaacgtgtctgtggtagacagacaatatatttcatggttgccaaaaaagtaaatagataaataaataaagagattggttgacagtgtgacgaacggctgcagcatgtttgttagaaaaaaaaacgattactttttctttaacaaagtaaaaacatttccctcccctctctctttgtggaaaaataagtggttggggataaaacataaacaaaaaaaagataaaaaagaacagttaaatatatagcaatactttagcaactatatattgagttattattctaagatcatcaattaaaaaaaacaaaatataaagtacaaaatttggcttgtacatatttacagatatatgagaaagtttataatttcataataataatattattattattattttttttttaaaaaaaatcttgttttcttctctagaagacactataatgttgtagggttattttcgttatatgaagagatattaatggtttcattttgggcatgaaatataggtattattctcttttctctttcagcttcaacttttatttgtagcgtttttttttttctttttttcctttctttcttttttagaataacccattaaaccacttttgaaaggctgttttctgttgttttggatatattggatcattggctgtagtagatttatttttagcagtgatattcgagattgttatggtagatttattaaaagattgaccaactttacgaggtaaatatctagctaaagttggagtaattgcagcagtcaatggaattctaataaatattaaacttttatgtaaaccatatgctaaaattagctcggttaaaataggagatgttttaatggattcccatcttaatttccattttacactcatggatctattggtcccattcactccgttctcttttaattgctcctcttcttcatctgctatgtacttatttcttgcttctagcctttgtctttgtttttcttttacttttattttgactgcgttatcatcgctttcaccatatccaaatacctgtttcactctattcaataaaattgatattctttcttcacctaaagaatgaactgtgaagtaacatccaggtaaactaatgaaagttacaccaatgtaaactattagtgcagagtatccatatacagagatgagttttttgatacctttcaattctttatgttggacttgagtggattgatatcttaaggaattacgtaagtttatcaaggttaatttataaggtactgaggtacgtaaaatgttcatgtttgagaagaggggagaggagagggagagtaataaatatctgtaactgctgttagtctgctatttcacaaggatgataaaggaagatattggtacgcggacagatatatgtacataggtgtgtgtcttctcaaatatctcttttgttggattaagtactattcaacactatacatccaatttattaccacttacatttttcacctcgaagatctcactaaaaagaaatgatcctctcgatctgtcatagaataaaaaataacaatataaacaaagaaaaagaaaagaaataagaaaaatacaaagatcgggaacgaacaagaaaaagagtacacaacaataaacgagatgatttggaaataggtttcataacactattaatgtttaaataaaactttttttcattcaaatattagatatctgagttgctaagaaatatacttgtacaagtattagtcacatatgtgataatatcctgttactgaaagcaccattcaagattcaaaatgataagtgcttaaaagtggtaccttttgggaaagatgaccatattagccattgtttttttttttggaagtctaataaagatcaccttcctaaaataagccttagtacaaattctcgattttatattgtttagtatgcctaataattttttttctgaagtctgtctatttacatagtttttaaaaaaacgtttttttttctggtgcataaatttaattttactagtttaagaattgcaaaaatcattcgctaaaatatctattgtctaaatgttatagaaccttcctaaaatattgttttgttaatagttgtgtcttttatttggttttattaaatatagtcttgtagtacagtcctgtggtattttttagttgaagaattttttttcttctttatatttaaatcacattttaaagggtaaccaaagtgtgatctattttgatctgagcttcttaaggttttgaaataagaagtagagcgtcccctatgaatatcttgttttttgttaatgttcatgttttagtctatattttggtattatcgattttgcagaattggtctcaattatattttgctttaactttcttatcattatcttatgcaataactacttgaagaaattctttacagttacattctattgaaaaaattgctttttgatttatatatatataatctcactattaattattacatatattttactatgccttaaacaaatagtataaattgtaccggttttctggagcaatgcataccactttaaattcagagacgaatacattgtgggtcatattttattatatgatatggcgtatgtagtattcttattttattattttaaaaataatcacaaaatgttgaattctgctaaaagataactagttttgggtatgtgatgactaatctatttagaaatttttgtgtgatcaatttaaaatcttcattgttatttacactgtagctcggtatttctgttaattatgtaataggttttttttttcttctgcttaagatgtaaataaagagcatcaatatttttctacattgtatctctttgaaagtcatatatagtgatgttacttattacatagatgcctatggtaacagcagctttgataccctaaattagtaacttaaaataagatttagagttgttaaagaaaaaaagtaaaaaatattgccaaatgtgatagttcaagtggagaaaaatgcaagtatctggaaaagagagatttctttctatgtatacgtaaatacaaaagaattcaactatatatcatcatatcaatatatttatttacaagtatctatatctatataaataacaaattattcataataatttttaaggatataacttacaatgaattattatttttataaagataattcctcaatttgtaaatttaagtctttaattgggtccttcttattaattacttctaacaatctattaatggacctcttatcttccaattctatcaaggcatggtgtaaaggttttatcattgggtatgtccagttaatgtatctctgtgaagaaagtataatacttaatgcatctgtatactgtttttgttcagtgaaaaaattgaccatgattttcgcaaattcggtgtctgaatttattctgtccttcatagatagcattgtaaaatgtgaagtttttctaaattcaccacgagctctccaaatatcagatccaaaatcggaatcatgaaattgagttgcagctttcatacaattggcatataatgaattttccatcattagtttatgctgtagtgagataaaaaattgtgtgacatcagaatttattaatgtcagatacttctcagattcattaatttcggcggcctcatttttattgttggtcaagggtaaagttttcttttcaataatatattcaagagtttgccttaattcacattgatcaaatgtgtaaagttttaatctcctataatattcttcctttttgtttaaccttactgggatggttaaatacgttaaaaggcatttatagttaagtatttgataattaacagaattctgtgatttcatatcagttaactttgttgaaagatgagattgtagctctattaaatctttggcttcttttatcaattgatttatagcttcaataaaaatatctgggtatgataaataatcatcagttacacggcctgaatttaaatggaagtgccataaagcattagattcaaataatacttgatctatatcatttaattctatcaatggtaaaaagggtaatataacttgacaatcttcataatttcttaaagtgtaatcagcaaaatttaataaatctcttctcaaattacgtccttcgtcccagccaattaataaagggatttttccaggaatgaattttgaataagcaagtaacagataattaaataaaactgggttcatggctctttgccaagcttcagtgtcattggtactttgtggtttaaaacgtcggtattggttcattgtatattcaaaatatattgcacgagcaactgccacatcgccatcatatgcagccaaagacatcattgcacctacactaaatagatcatttttattcatcattccacttataaatttccaacctaacagtcttaatgcttcattgttaccttctgaagaaatattgtctgaagaacaagtagctagaagagttcccattaaggagaatgtttctacacttggtgtaatcttccgatctttcatttcgtggaatagatcaatagctttagcataatttttggtcttttgacaaattgttaacatgttattataggtctttgtatcaggcgaatgtgctgtagaaagaaacttcatagtatcaaaaacatcccatgccctatctgacagatttagtttagagtaaaattgaataatatttgtgtaagtgaatctatctggtgagatgtcatatttttccttaaaatgttttaaaaaataatccacagtggtcacatttaaagatttggaagtataagttatacaataatttaatatcatattatgttgtttctccctttcagtaagttgcttgttatttttaatttgagcactttcaatagttttatcgtatcgttgaataagatcttttaatttacacagtatagaattattgtcagttaatccatctttagtttgaattggacctaaataagataattttgagatattcttgaaaagacaattatacatggcaaatgaaaatttctctagtttattatctacaaatatattaaagatttcatctaatttattaatactgtcgaatgacaaattctgaatatctaaggacaaaaatttcttgaaacttttatttgataattttttcactttttccttatttgaatataattgttcaattataggattccaattttgttgtgttttgttagacagatatttaataataagttcatcattatctataatcttttggattttttctggcaatagacttgtagcttgagcaacttgtgtttgggatataatatccgtaagactaggaagtttttgtgagttgtttttttgtttgagtttggttgttaacagcgaagtttcattatcaaatgttaaagatctataaatttcatcagcatctctatccaaatctgttttatctaaatcgtttaaggtttcatatgctatagtcaaatgatttggggagtgcgataatttttgtttcaaatttttggtgaaattttgcaatttctgtaattttttttctacaatttttgaatcttcaatactcatggaatcagttgaatccaatttgtcccatgtttcaaaactttttggtattttttgctttttctttatctttacattagatgttgcgcgagggataaaaacatatctcttttgagataagacttgtttatatcctgttaaagtggcatttttactcaacagatgagaaagcctagcaaccatgaagataatattgtataagacttttcttcaaactatataatttatcttggtagattactttaacttgatagagtcatcaactctaactttcttagagttttgtatcattggagtaacttataaatattcacgtaaaagaaatcatatatatttttatgtgtgttctgtatacataacgatgagcaacagtaacttttgacagagataattgcaatactaaatgctcgaacaaaacaatcttgtggaagcataaaatctgacaagcattttcggaaacaacctaattccgttttcaaaaagagaatttctctaaaataaaaaaggaaaaaaagaaaaattgtaaagttaaaaaagagatgagctaaaatgagatgagctcaaaaaaacattcttaggaattgaaaacattaagatcactttccttgattcttgtctccgattagaaaattgctaagaatattaaaattactagacttattgtcaatatttgcctcttaatcaaataagtggaaaaacatgagtgaagaaactatgaataagaatgcagaaaattccaataacaaccaggtaaaagaaactaaaatcaagggtccaaacgttagtggaagaccatggaaggcagaaaaagagccatttagaccaaagggtagagtggtaaaaaataaaactttgacatcatgggaattgaagaagcaaaaaagactggaggatttacaatttaaagaaagattgaaagaattaaagaatgagaaagaaacacttcgtcaaaatcgtataaatttattacgtgagagaagagagaagaaggcagaaagagaaagatatgaaaaaatggctgctaggatgcatgctaagaaagtggaaagattaagaagaagagaaaagagaaacaaagctttaaaagaacgttgaatgatactttgtatatttaaccgtacaagttactctagttatttcatttttctgtaatcattattattatatttactcaataattttgtatattataaaatcatgttattaatattaatttatatttataaaattgaaaatatctgttcatgttatgtcatatcatgttgacgcaaggcttcggaatcaaacattctagtaaagttcatttaagactaatataataagataaggtaacttacaataggatattggtggtattattagttattccttggtcctttcctttctatataagtaatatacaaaatacaatattatacagtatactcattttatctttgaatcttctttactataaattttcataacttttaatcacttagtacgatgaatttagattatcaaacataactctaataattatatttcaacatatcatattagaattgaaacaaaaacaaattaatatagttgacatgcttgagagtggaggtcagttgttttcatttcgtcatgttagatatataaaaataaattttaataagatgataaattcctgaatagacattcttatggatatttcttgagttataacgttacctgagtacataaggagtctgaaatcaaatactcaaatataaaaaaaaagtattttataatacggaaacggagtaatatatataaatagataaacaataaaaaacacataatttagagatatatgcatatatataatgtaatcttgggttgtagtggtcatacgttgttacctttactattattaactattttcttttaataatcaatgtgtattatgtatgtatagtgaatatgaaaacttactattaaatttcataaacaccttgtaagtcattttgttcatttatactctatacaagaaggcaatgattataattgttataaacgtgttgacgcaaggcttcagaatcaaaaattctagtcgagttcattttaaactaatgtaataagataatgtaacttacaataggatattggtggtattataagttctattattatttatagtaggaagttagtggtactataaattgttattttattgcttagtccttttctttctatataagtaatatacaagatacaatattatacagtatactcattttatctttgaatcttctttactataaattttcataacttttaatcacttagtacgatgaatttagattatcaaacatagctctaataattatatttcaacaaaacgtataaaaaagcaaaaaaaaggataattattttaataaaattcaggtataataccattatttcgtaacttatttaatttttttataccatgtagctgtgagttaaataatttgagatggatccatatattcatgaaagtaagaagataataaacaaaacatataaatcatataccattcacatttttaagtctgtccttctaacaatagcttcttagaatattactacacctcataaattcacatatcacaaataaactccttttgaatataacaaacactattctttgtgtcatcaaagacggcattataatcttttaagtaaattggcagtgtttatgtttttcttgtttgcaaactttgcatctatctatgcaagttttttttatgtagattatgacttatagattttgtatatacgaggaagatcaagaacgactcattatgttctagaagagcatatctcttgtagtaggtcctattgtattgcttaaattttttttagtaattcggaaatattatttccttgatagatgtagtcctgctacaaaaaaatactctactagaatgtaaaatatgataaataatttctgattgttgttccctatttatgcattacaaaatatagtgtatatggaaagtatttcagataaatagaaatattgatatgtataaggtttatagttactaaaaaacaagaacagcattaattattaaaatgtctaaaattcgtctgtaatgatataatgatagaaaatattaacatttcaatttttataccggtattataatagatgaaaactcgattacgagaaatatactcttctagacgctaaaatagatagatatagcttgatttgttatctatatatgatatataaactatactctaaacaaggaataaattaatacacacatatatacagataaacatagttatgtaaacaagaacgtcgttgtcaaaaagagttcacaaaattgtttatagtgatatccgaatttcatatgtcatatataaagtaaaaatataatatctctgatattactgtttagggtttgtttagaaaaatgagggttgacaatatattacaaaaacttcaaaaagtccaaaaaagacgacaactgcaggattcgaacctgcgcgggcaaagcccaaaagatttctaatcttacgccttaaccactcggccaagttgccactgactcatgccctttgttacagaataggatagatattaccatcaagattacataagatcctgaatgaatctagaattatttattgttttgagaagccatacacgtgctacaatattagatgctgcataataaaaagattagattacataagactttagcaaatctagaatttatctattgttttaataagtcccacgtgtattactaattaccatgattagagaattggggtgcagttctaatccactagtgcacctaaattaatgtaataaattttagggtgaatcagtcaagtcattaatgtactaatctgaataatcgatcgagctccagaaaacatataaaagaacaacgttttctggagataaaagatcatcttccataaccgtttcttgtaaataatttatatattatagatgaacaaaaatagaataacaagcaagtaacaagccaagtaacttcgaataaatatattagctcaataaaagctgctcaatatatatgactgttttagtaattatattatcgactatagttgattactgtctcgactatttgaatatctgttgatactattggtgtttccccgaaacatacaaaagaacctgatcactacgtattacaacagttttctttagacttagctaggaagataatatacattaaatatctgtaataataatatacatagttaaattgtagaagcttgttctattttatattaaacatatgtgtacacctgttttcttctgtagaaagtaaaattagagtttttatttcaacccttttataaatttttacttcttcaaatctttgaaaaacccattcagtgaaaagtaaaatctttcctgcctgctagagcacagccacacactgcataacatacagaaaaactaagttaaaaatgattcttatggagtaataaattttccttttttagcagagttattccactaaataaatgttaatagtacttttttttttatttttttgtcttaaacaactaatactgacagaatattctaatgataatgtacaattaaactactagaatactgatattagtttgtgcgaatttatttccatatatactgaaaaaattaattagaaaaaaaaatatttactagcatagagataaaattaattcacttatagaagtcagagtcttagaggccttttattttcatataaaataaatatcataaatatgaccattaaagttttaatacatcaaggagctttaataacttttccataaataaataggaatctatagtttcaaaaataaaagacaaaagtggctaaataatcaatgtttcatatttaccctatttgaaagagaagtcattattttttcttaaacagtagttgttttccttatatgtgtgcacttatccaatattaatttttctgaattaaaaaacattaaaattctcagtttaaaagagtttaactatatgatattaaatagaaatgctttagataaataaactgtttacaaaacaataaatatttttggtatgacaatccaaaaacattgttaagaagaatcggtgataatgtctattgattccagattatatacgccagatatattttcatattgaatttacacaagaaaaaaaaaaaagaaaagaaagaaagaaagaaaaactactaaaaatattcatgtaacacaatttttaacaatgtatcatatttaatactatgtattttatctattatattattataaattttcgtactcatcaggataaaaaattagtctttccacaccttctttagttaaaatgaccattctgatgacaccaccagaagacccatcccatttaatagcttgagatagggaatgtttcacaaaattgactgtttcctctttgctcatattttgtttataatttttatcacaataaccatatatgaaggccgaaccagaccctgcaatagcataatcttgcttatgaacagaaccacctaatggaatgctgtaaacctcacctttctcctttttatcatcgaaacctgctacaatgatacctgctgtcaaataatctttgttgtcataacatatagtcttaaatatagatgcggctgtttcaatagacggtgtaccatattgcgctgtatataaatctaaatgatattgaacaatgtctgccacggcttgtgtatcagcagcagacccagaccgacaacaccaaatcttgtcatgaactcttgttaatttatctgtaacacgatttgcaatatatgcaccggtggtggttcttgagtcagcacctaatatcacaccaccattaaaggtaaccgccatgatggatgtacccaaactcacttccccttttttcaaacggttaatatctacttgaataccattcatttcgttttatgcaacttaatttcaataaagaatataatgcttttttacaaaatagatcaggagtcagtaaaacagcaataatatgaatcaattgaatttactgctatctttattattatcttttttcacctttatttttttatgttattatttgcacgacagatagttaaaaaaatcaactgattttggtgttgatcaagataatacaaccgtatgtaataactcaactggacaattgtactcatataaataatacagaactgtccttcttttcacaggtaaagattagcaaaccctttctctgcaatgtcttttaaattccattaaaatatttgttttttctgattttgccaccacttattacccgcaccttttccaaaaggaaaaaaattaattatataaataagacagaaattaaaaagagcaatccccccaaattataggtatactctaatatccttttgagatcaacatatgacttaaaatcgaaagtactctgatatggattatattcttgcaaaaattgtcgctttttctttttataatacacacacacacatatatatatatatactcacatgcattgttaatacttatatggatattcttaatgcagtcatcttggggaaaatccaggcttggaaagttgtggaattggaattcttctctctggagatccatttaatacggattggcttctgtgtttcaatcgatgggattgtggaggtggccgcaaaaatgttaaatcactaaaacgtaattttccaggacttttagtatgattactgggatcattaggaatttctgtttgtcgcgacatgatcttcgattgtaatctttttttcacagtgttaggcaacgtagaagattcttttaatggacttggaataattctagctttattataatgggaaatcatctcttgcattttgtaccttctcatctgtaacgatccaggaatagtggtattgcttacttgttttttaggagtcctcatttctacaatatgacgtggagatatgttactattgtcagagaaatgtccttcatcatcaatgccagagtaacccagacttgtaaattggtttcctatttgatctcgacgattctctgtcttcattttccataacgttattaaacctcttactgtggctctttcccacctttgtctgaacaaatgtacagttctttcatttcgagctattttaaaatgattcatactccacaaccgtaaatatgtagacaataaatacaagttcttctcattaattgcctgctgtaaaagattatttaattcatccaagcgatatttccataaagcgaagatgtcatatataattgtgttttcttttagtatatcggcacgaagatattcggattggtagttattgaattttgacagcattagattagaaaaatgttttaataaccgacggttattcatgtcatctgcaatgattatcaggtttcggcataatataatagatctcctataatacatttgaaaatatttatttaacagcatggatcttttatgatcagtatataagcttagattattccttaatcttttctccttcagtaaattataaatgctaatccatttttgtaaataggtattcattattattgacgaatatacctggggccattccaatttccccattaattttaattctcttagtttactatattttcttttaattttactgaatactttacttttaattaatacagcacattttttatttaaactgctaataatagtagtcctggatgttattttttgtatgaatttgcgtcctaggttattcttgtaaataccaagttctttcttattcaaatatgatattttttcattatgaatcctccatattgtaaaatattttgaataaatttttgatataacactattttgatatcgaaaaatcaatttagtttgtttgttccaatattctaaatatttttgtctagaattaattcctttaaactgtgtcagtttcttctgaagataatatctttttttccataacttccagatatatttcaaaagggattcttctctaaattgataagcttttatctgtagataaaattgtttagtaattaaatgaatatacttcttcttcatcgcttcattttgtattgttgtgaacgaatagaaatgtaacctctcctgcagtctcttataccacatttcacaaagaatatggcttgtcaatgttttatctaaatgatctcttgcaatagatattgattgtgatagtttataagaagacaaaaatctattaaaatatctccttttgagagattttctatatgataagatcaacttttcatgctttttattttttcttttcagttgattcttccaagttaatatagtctttttagtaagaagaagatatctagctgttgcagcttcttttatcattgcttctctatcttcatactttgtccttatttttgataaaaattttttcttcaaatatatccttctcatgataaattcattaagcctaaattgaaaaatccatatttttaggtaatgtttccttaaaaggtcatctcttctttgcgtaaatattttttcatcttccattaataaagaatatatctttttaaatcgcatgaagatagtttgcttaaatttactatctgctactaaagtcatctgttgtaaggtatcatatgcaattaataatttgtcaaaaccaaattcttttaatcttgttttattaacattattggattgttctttatattccataccatatttattaaaagagctagtccatttatggagaaatttagctttgataaatgtttcatacagtgtaagactattttgggttacaaacttaatcttccataatgaaaagtgtatttgtaataaatttgagcttttatcaaattgataattaaccaattttaaaatcaaattatctggtttaaacaagaattttttaataatggattccatttcataagtcaatgaaaaaccctttgaaagacagtcttgaacttgaagtaaatattcgtcagttaatggattaaaccccaattcaattaaataaccaatataggatttgaatctcttcaaaaagtttaaggataattgatttcttagtaaaaatacttgaattctattatatagtctaggtaatatttctaataattcctcatctgagatatctttggttaatggtacaaagggaagattaccatttacgaggtcttttttaaattgattttgaggtgtcaccacattattatagctgtttagcaactgatcattttctgatagtttgatattattaaagtgtgctagttcatctgagattgtatcttcctccgtgtttttgataaatccttgatatcctgggtcagaactaccttctatttcccccaataaattgggaatggactcaccaattaatcgttcagtaggaaagaaaaccgattttttattaagtaattctaaagtggatgtgtcttcagtctgtacacttgtgtaatcatcatctttcttttctgtacaattatgtcttctgtcgtgttcaccgatgctaatcttagttaatttactcataaagggattagcggctgccatgaaactataaaatgaaaaaaagagttctacaaaagaaaattggtagctgacaactggctatattggaagtaaatagtgtcgcctcttttccgcatatctattcaacagcagttacattttcctgaaaggaaatttctatagctgatgaactaagaaatttgtttctacctctatctatgtctcttcttttaagttgttcacactgttttctcttttgattcacctcaatgtgcgctagcatttaccctccctattacagaaaatttttgaaaatttcaaaaaacactttaaaaggaagagaagtagaactctgcttttgtttataacaagttaactttgtttagtggtgaaccttactttggaatattgttgtttttttacaactgatcaccgctaatcatacaaaaagagtgaagttaacattataaatatagagggtatttggtgacaattgtaataaaatagtatatagataacattaagtattagaaacggccaatagataaaaagattttaaattattacaatttcacctgtataattgaaagtttttacattattttgtcagcaatacttagtaacaatgttgttaaccaagcaatccttaactgtttttgttcttttattggtccaattgattggaacttttgctcaaggaatactaccaagtggttgggaaaatataaaattaactagagaattggatctacagcatacttttaccgttgagagttttcaattaactatcaaaaatattgctgataaaccattgaaacaatactttatccctattcctaaacaattaagggatcagctctcaacaataaccgcatcattatctaagaatactgatgctttattaaattgttatgtatctgacaccttaaatactttagaagacggtactgttttgagttatggtgttgttgaattgccaactcctcttcaaccaggcaaggaaattgacattgttgccagaatattctataatatcgctggtatcccatatccttcaaagatcaaaattggtgaagtccaacaattatattttagtactaatagattaccactatctccatattccactttggaaggtcgtttgttagtcaaaaccaagagtgatgtgaaggaggataacaaaccggaagatcaatttttacaaggtactttcaatgacgacacaaataccttagagtttggtccttggtacgatattaaaccatacacagtatccaatgtagatctaatttacaagcatgtgcctgctttgaaagaagttatcaatttacaaagagatatctgggtggctcactgggcatctactattcaatttgaagaatattatgaattgacaaacaaaggtgtcggattaacagatggattctctagattagaattcatgaagcgtagtcaattggcccaatttggtatgattccatggattcatattttagaaatgagtttaccagagcaagccacagaacatttctgtacagataaagttggtatggtatctaccactgacgttgttggggatactttctacattaaaccaagattccctatttttggtggctggttttacaattttactattggttggactaacccattaaaccaatttctacagagatatgaaaatgatgatgaaactttcttactgactgtcccaatcttaaatggtccacaagatacagtctatgacaatgttaacgtcacaatttaccttccagaaggtgctgaattattagatgcaggttctccagtatcttataaatctatatcaacagctcatgaacactcctattttgatatgaaagaaggtcatgttaaattgacttttgagttcaagaatttatttactgatattggcaaagctgatctacttgttaaatataggtattctaaagctgctctatataagaaacctttatctattgcagcttactttttcagtgcattgatgggattttttgtaattcgttctttgaatctatccattaataactgaatggaaacataaaaaacaaaacggtgttaataataaaagaataagtatgcatatatatgttaatacataggtaaaaaaaatttagagaatatttttgtatatcaaatgtttgtacactttttttgtttgatcagatatctctaaaataaagttggtagggatgtgaaatgttatgacaattctttgtcaaatattttcacttgatgtaaataagctacaattaataatgtttgaagcatttatttattacatagtatcaacaataaaagaaaagaaaagagattttaagttgtttctatttgaataatcaaatcaaaaaaatgatacatgttaaacaactttccaaaattcaacaaaaaataatatttagatatactgttaatggaaatgaaggaaatcgtaatagaattttgcttaaatgttaccatattctattgaaaacaaaaataaagctctcctacaaatacctctttagtatcccttatagtttattatgtgatctatcatttttacttctttgttgtttttttgcaggtagcaaacttcctttttgggcaaccatatgccagagtttgtattgtttcagcacatctttagatctgtcccaaaaagataataatacctcattggaaagttcctttgtaattgataggctgtaataagtaacatgatttatttattgtcatccttttttagttaacatagtatctgagtataccagtgtaatttattttcacaaatcaatagtacaaataaacaaatcttacaaaatattgattaataaaagataaagtataaatacagggtaaaaaattcttataatttgtgaaacaaatcttttattgtcgaatatgtaattttaaattttaatcaatataaaacatgccaaactaaaataacaaaaacaagcataagttatattttctgttattattcaaggataaaactttcaaaattctaaatatcaaaaagaaaaaaatgtcaaccattttatattattcaccaaattacattagaccaattgtcccactttgtcttgtcaactatttcaatgcaaatgttactactgttgatatggcaacagagcaagaaaagttttcaaaagagtttcctttaaagaaatgcccagcattgattgacaatgagcaaggtatttatttgactgaaataattgcaatctgtaactatatcattaaaacatttgctaaagagacaaatgaagttaaaaagttactaggttataccacattggaagaatcagaaattttaagatgaaaatctttgtctgttagtaattttttgaatcgtgaagttgattatatcggtccattaattggtttaattccatatgaagctatggcccatgaaaaagcaagaaaggattttgaagcagtccttcaaatttatgaagatcgtttaaaaaatcataattttttggttagtgaccatattacacttgcagatttaagttcagtaagttgcttttaccttgggtttacctttgcttttgatcaaaattggagtaagcaatatccaaacataactagatggtataaagaaattacaaaatcacaatatgttatatctttcttttcagataaacaacaggctaaggctttctcacaaccaccacaataaatggcctagacatatattttattatatttttttgttttttctctgttttttttttgtgtcatgctaaatatatatatatatatgtatgtacttataatataaaaatagttatttttttttgcgtcactttaattgatagcatagtaactttcttagaatatggtccagaaaaagtcaagtttaatatatattaaatgttgaaaagattattgtttccattaacgttcttaccagtacaaagagttcaaccaacatataaatttgtatatatcattttaatatttgcttctatttattttatcattggtacagaaatagtctttatttcagtttttgctattgattctgagattcaaacaaaattaggaagccctaatatatggatatttggattactaaatgcatctttatttttggggagtaacattagtggaataattttctataacttaaataaaaacatatcaagagttgatttatttcaatttgcaatactattttggatactaattaccatagttcagttgattaatccatttaattttgtccttagtatggtgaccaggacccttaaaggttttttgatatttgcaatacaattggtagttccgatgtacatagcagaagtttttccctttgatatttttaataaatttataacaattttagaaatatttcaaacattagggatattgatgcattttttaggaggatgttatatatgtaatcataatcataaaactagaaatactgaccttcttattatgatatatttgttgttagctctaataacatactgcttttcaatttttattccagaatctcctttttggttaattttaaaaggtaattatgataaagcagaagaaaatcaaaaaaagtttgcccagttatatgataaactagatatatatccctcaaaaaataaagttgatttagtagatttttatttaaacaactctattgtagaagataaggactcaattaaaatgaaaaaaataattttgctattttctattttaatgaaagtatcttgtggaatgtttatcctatattgttataccatatattttacaattattatagatgagcatgatagttctactggtgcggttcttcttatgttaacattgattggtttcatactatcatataaactctttgaaaatttagaaataactatcgaattgcaatataaaatctttctagcatttatcctattattttctgtaatcaatatcgtagattcaatattgttaaagtttgccttccagagtcgaattgtaagagaagatctaatcatgagctttttttgtcttttgtttgtggaatgtgtttgttattctttagctgtatgcactttaccgaatattctttgtataaagattgcgtatgattcgagaaattctcaaataccttttatttatacacagatccaatattttgtgattgcaatgtatcttatctgtatgatacgtttaatttctgatcagaaactaagctggatatttttcatgtttatgggaaatatcaatattttttttatgatcatattgtgtttggtcatgaacatttacaaaaaagagacaaataatagcagtaacatttcgtctacgtcagaagacagaactgaaaacaataaacaaaagggaatggatcctattattttgacaggatttgtttaatatttctcattataaatgtatctttatatatgtgtgctgtctaatagtgttgtttatatgttatgaaaatgataactaaaaatttcttttttatttttgtataataagaataataattaaagggcccttagggaaataaaaaaagaatatatctaaatacccctccaaacacatttttcaacaacctcagtctttttattagtagtttgtctgaacaaaccaagatgattcaaatcagatagtccttgcatgaaaaatatcagcacagtcttttcaaaagctttatcacttgatgttaaaaattttttcaaatttttatcatattgagattgctcaatcaaaaaattcataatacattcctcaggtaatgattctcttaaagcaacataaaagtcataaagattaatcattgagttagcttctctgtacaatttgaacatttgagaaactataggggccatggaattatttaatatttttaagctttcaatttcttcagctgttgtttcttgaagaatagagactattggtaataccctttcccaactcaataaatcgtcttctatatttgccttataagatggaaataatgattgtgttaataatccagtgttattatctaaagtaaacaattcttgaaacatagtatcaataggttcaaaggataatttttccttatatggttgacattcaggccagcgttctaaatatttatcaaggttacccttaagtaggttataatatagttcaataaaattaaaatccataacattcaatgtctcctctaatatatttgcaacgagttttgcatgtctgtttatgggattgtccctaactaaaaattcaatgaaaaaatcttctaatgtaccattattatttgtcaataatccaataatgtcgtccgtggtaccttcttctttggctaattcatcaatgaaaaacataaaagtgggacaatgtgtaagtaaatttaaataatcctcttgtaaaaaagaaatattgacaggatcaatgaaaacagaaaatggattttgataaaaatatgccattaaagaaaaatctaatattctagtaagtaattttaaattatggttagtattgtttgccatcttatctaatacaaattttacaaacttttcagataagttcagtttaccatcaacagtatctaaaaaactttgaaagatacggttaccgtatttaaaacccttattgctagaaacgtctaatttatggtattttcttttcaatattcttaaaatagattggttcaaattttgttcaatgttagaaagatttgtgtttatatggaaaaccaaactaattctgacatgttcatattttaaggcactctttaataagattataaaatcgttcaatatattaaagttaaatgaatctacatctttgaagttgaatactatatttagatctcttttaaataatattttgaagttttccactaaagttaaatcataggaggttgctgtagagggccgatcatctatattatttgtatcgttatctttggaatgatcgttatcatcattattttcataacccaattcatctctattgtcattaatgttatgtttatgaagaatttcttctgtatgggaaaataatttgaacatagatctccgcaacatcattcttacgttaggtgattctttgggagttaaatcaataacagtatttacttctgtaccagtgacaatgttaggataatccagatcagtagtgctgtcggatcctattagaaacagggtattaaaacatggttttttgtgaatacttgtgttattattattatttaataaaattctggagatgtcatttttcaaatctgtttcaatattagctaaaatattatcaacttgtgaatgaaaggtagagtgtagttggtgatataattgccatcttttctctaaaacttcagaagattcttttccatccaataatttgacaaatggaatacactcctcactaaaatttattgatccgctaaattttggatatataatattatgacttttttgagcatcggcaaaactactaacatttatcatattttatgtctacttattattattattattattataactgtaaattatagtaagtatttcatattactcctcttgttttctcattttctaaatccaataaccttttgtttgattgtaataaccaagttttctctaaatattcaataacaatttatttaattcatccaatttttcaatgtttacaatttggatcaaaacgaaaaaaataaaacataaaaaaaaattttggccttagtattaaactctatttttttatagtttgaaaaaggtcatttttgacggtgatttgcacagataatagaatacttattctgcatagtgttcagtaataaaaattatccaaaaataagttgatttatctaatattagagttatatgttggacgatggtcttctcgttttaatggtactaatattttaccattggcgaaaaatatatattattattttttgttatgagttaagcaacgtttagacttacacaaaacatagaaaaacttctttttcaaatagacaaaagagacactagacaaaaagatataatttcaaacaagacttgtaataaagcatacttatgattttgacgaaagattaaatttatagaggaaaggagatgtcttctattcctttttttcatggcttttttgtgaaaaaaagaaagagacgatacgtatatattaggcttattttcatgaataaggtctactggagaagaatttaataaaaatatgtataataataatatttttttttttcaaaataacatgaatatatgcttgtgtaaaaaccttggaaacgatttttagagtatttatatctaaggattgaactaacattttaccaaaattctaaatatatatgttggtaaaaattcctttactttccctcttggatttaagattagtgaaattagctgcggcttttattctatatttaatagtactttgtgaaagttttaaaattatcagttgatattttttattaatctttacagttaacgtgtctacaacattaacagaaactgaatagaattcactgtatacaggtgttaattaattgtatttataaaaaatgtcacaaattttcaaactactggtggatttaaaggtttcaaaaagaaaataatttaataaatgttttatttcattttattttttttttcgtatcaatatttttataatgaataaaacaacgaatataaaatcaacaattgacttcagcaagtgtttaatttctttaaatgcaaaaagtgaaactattaagaattggcacctgtagtcattagaaaaatagtgaatattctcaatattataattatacagatatagtatacaaagttaaattgaagatcttcgatcttcttctgcatgtataatacagagaaaataacatataaaaattatataggagaagaaaaaggatatgagaaaaatcattagctttatattttttatatcaggtatatttcatctataaagggaaccaatttatcaatatgttttgtttatatttacagagaagcaaataatacattcttcgcattttgttattaatttgtaattgttaaaatttgactggtttatctatttattctaagatatttgattttagcaaaaacagtggaagagacagtacttaaaaggtgtatacatgtccatatatatatgcctattttagcaatttcctaatttattcatttatttgcattatttcaccctcccccttattgttaaggtaaactttattcatatgcatgaacaacaataatataaaatgaagtaagataaaaatattcatgtaataatatttgtataatgtacgtgttaatcgtaaaaagagctttgggaaatttcttttagagtttctaagttataaatatcattttcatctgcatcctcatcaatatcattatcactgttgttgtaatcgttattattgcctagtatttttgtaactttatcattgtagctaataaagttttgttcagttccagaaggagtatcaccgtaatataagttcattaattgcaattgctttattattttcgtaagggtatttatttgttcttttgtttcctcggataagttttcttttaaaaggaatggagatagtagttgtaaaccatcaaaccatatgaatttatcttctttattttctatgaaaaagtttaataaaacttttcttcttttggttaataatgaaatttcacatagatattggttgtcgattctattgattaaatatgtgtgatctctaatagattttgtctttgtgttaaattcttcacattcatatattcctatgcttcgaagcgatatacttatagttggaaaatttgtaccactaatatcattcgcaataatcttattatcaaatacttctggtatttttgttgtcttttcagaaaattctctagctaatagtgtattttgattataagataaaataatgaagtaaacagaaagcggctttagtgctaaatctaatggattttgaaccgagacccatgtacctctttgtaattttgacaaccgttgttttttgataaaatcatatacctgcaactttaaaattttatcgaaacttttaaattgaatagaccattttgtgtcaaatctaccttttaatgcttcaatttgccatgatcttaatttttcataacttaacgattttatgatcattcttaatgcactaaaatgagtctcatacgattgatctaatttaatcgaagacacttctttaaagattaattttaatgcaacaggtattaaatctattaatgattgtaaatcactatttgtaatgttggagttggcaaatgacatccataattgtagttgaaataccaacaattcatagataatgcaatttttctgaaaaataaaaagtgaggggtatagcaatccttttaattcgtttttgtttttatagcaaaattcgtggacgttttcagagattttggaaagtatattaaataggggaaacttattaccattataaaatatcaaataatcatacaaaagttctctaaatgatgtttgcggactgtttaaaaaggcgagaaggtctaccgcaagtagcaggtttagagaaccataacttatagcaaataatgaaaaatcattattatttaaaatattatatatgggaaagaaatttctgattgaattctccaatttctctcttaatagcggatagttttgtaaactttcagcttttagaaactcatacagttgtaacattgaagatgttatttcatttaaaataatatttctaatatcaaatgatttagagcgaagtactaaaaaaatgaaaactttagatagattttcattgttaatttttgataatagaattggtattaatgtgcccattaatttctgatgagaaactgttaaaagtaaatgtgttttaagaattaaatttacataatgcaaagcaataataattgtttgatcttcaaatgatatggtatcctgaagaaatttaatcatatttggtgggatataattgttttttaatgtgtgttcaaaaaatattataatctgattaacatatttattagggttattaagaaaatcttttaaaatgagtccaatcacagtaatatgctgtttccaggagcttactgataaaaataaatttaataatttcagaaatgatacattagatataacatctccaagtaaagtctccgtattacaatgtataataaatttattcagtattggtgttaaagcttgtatatcaattttttctttcaaaatcaacaaattatcaaaatataattcagagtgtaatatggacaattttatactttcatcatcctctagttttttcagtatatcattaagaattgttaattcggatacttcgttcaataataatggtgaaatattagtactagcattttctgtcatactgcatagtgtaagtgcgagtttagatgaacaactttgaaaaaaagtagtgtaaacaatagttttgaatattttttacgataagtaaaattctggttcgctcaacattgaacctctagatcggtctttaaaacttgtgctaataatggcaattaacaaataccttttagtaacctataattataaaggattgataaactattgcaatctgattccaataaaatttgaaactattcgaattaacgccccctaaaatacatatgcctcaagtatataatttggatattattgtatgaaagatgtatttaggcatatattcttacttatgtgcagagaatgttttctttaatcctttttcttctgttcggaaggactaaattttgaaaatagaaatcagtttatacaaaatatcaagatagggaaggaaacaacataataaagtaatgtgttgaaaccatgcgtattggatgaaatctattaataatagttacacagcagttacgagtgttgaagctaaattagaattatcaaaataatatttcaattgttttactagttatatggtgccaaaaagaaagagatggtagatctacatgctggttcccttttaagtaaatttccagatcttagtagaatgaaatataataatatgacagtagactttgacgaaagccttatagagagtttacttctaaaacaactattttcaatagatagaaatatttcttttcccttagaatatttaaatgaaacatctctaaataatctttttaagaaactccaagatttatcaggaatcacggagactatctttaaagagaatcaaattttgcaagagtctaagatattaaataaatcaatatcagaaattcaaaatagtgctaaacaaattacaacgtctgcatggtcatttatacaaggattggtcgttggacagttaagtattgtcattttattgatattttttattaaatttttcatattcgcagatgttaaggagaaagataataatccatctattccaaagaattctgtttcatttagaaggcatggtttaaacgacgcacaacgaaatagcaatttaacttcaactttaacaaattctttgatttctttttccaccatattgaaaagagggggtgaagaagtgaagactatcactgataaaagcggtaatatccaggaaaatgaaacatcggaaaggtcggttcaaattaataatattttaactaaaacttcttatgatgttaatttacataaatcagaatccctggactggtttaatgtcctgattgcacaaattatagaacaatttagggaagaagctgtcagtaaaaacaatattttgatgtctttaaataagttctttacaaacaactttatcacattcccagattatttggatacaataaaagtaactgagcttgatattggtaataattttcctatattttcaaattgcagaattgaaaatgaaaaacaacaattagaagcaaaaatagatattgatttaaaagatagacttgcattggggattgaaacaaaactattattgaattttcccaaaaaagcatttgcagcgttaccaatcagtttaacagtggctgtggttagatttcacggatcactaacagtttccttaacaagagctgatgagtttatacatccattagaagagaaaaatacaaatcaaatgaaagcagaggttgaagacgaaaataataatggatattttttgattttttctttttctcctgagtatgtattagaatttgaaacgacatctttaattggtactagatcaaaattagaaaatacaccgaaggtggcaagtttgatcgaatatcagataaaaaaatggtttgttgaaagatgtgttgagcccagatttcaattcattaagctgcccagcatatggcccaggagtaagaatgtaagagaagaaaaaaatgacaacaattcataataggacgctttctttttttctaagttataaaaatggtttatgagttataattatgtctattgtattggtttcaagttaattatttagttataaaagtttatatgaccatcttcacccatgtaagatttatcaatatcacatattaatccaaacagtttatacaaagtgtctttttgttcatttgctactccataatcatcatatggtatccatattttattaaggtttttggtataatcaatgtttggtagttggtatgtatgaaaataattatttatagatacatattcttcagactttgtcggttttatatcattatcttgaagagatgtaagcgaaaattcataagcagaatgtttagtgaattttgaatgtgcaatagctgtacatattaaaagaatcagcatatatatcaccagatcataacgattcccaatagaaaatattcctagtaaacatagttcgaggaaatacattccagcataaagttgaagcaatccatgtaaatataattttccaaaagtttccgatttattctctgtgttgtattcgtagataaataaatactgaaatgatagattgactattgaaaaagaaatacaagctaatggtaggattaaaggagctattacactgtagattagagttatgcaacttaaaattgaaaaaattggatatattgatccccatcggaataataatgacgttcttaatgttttgagttttttatgtggtggtgataaagtgaagattattctatgtaactccaacaaaagttgtttgaaacgtaaaaaattgccacctgcataagaaagacctctcattattacaaaagaacaaaaaaaattggaacttttgggtaattcctgtgctagtaatgtcggaaaattggttgggttatccaatatattctctattataaacgatatgcctgatgatatagtaaccactaggaatatatgaacgaataaaaatgcaaaaaaccaatgttgagtatctttttcaacctcagttcttgatttacaaccctttaaaaatgcaaaaaaattaaatattaaaggaactgcttctgttaaaattattaatgttattactggcagaatcatcattatgatgttactaagaaaatctggctcaaatattttatcctttgaatttcgaaagaaaagtgtgatatatggaatttgtgatattgatgcaattagtgctactggtattatccatccaacaattacaaatatacttaagatattggctaaagaggcttttaaaaaatgaatcactctattatgggattccatatttttccagataatatcttgtgggtgtaaaccttgatatgcgatggttgtgtaatgttcatcctcaatgagatttttgtacaattttgcttcaaatggtgttttaaaatttaaaatcatgacgtttttaagcacgtggtttggtaataagtcagcagtttgcttattctcatctcttgttctataatactgatatttttcaataaggtaattatattgttgtatgagatcagtcaaacacatgtatctactgtataaaaattttgattcattgaaattggatgctggagagattatttggatggcttctagagaattctttccacttctttttagtaaggataataggcggattccaagagtcttttgacaaaatatggcatatttacctatacacttaagtcggtaaatgatttttcgaatataagaagaatgcactatcgtgaaaattcttcggtaatatgtttctaaataaatttgaaagacaatctgttctatagtttcctccattttgtatatacgcttccatatcagataaagttgtttgtaatttttagcaatatattgaattctatttaaaataccaatctttaagaatttttgattcatatctatgacagtagttctgttttcacatataaggagtatgttctggtatttatatttcataatatgattatcaataatttgtttagtcttagatatttccgagtacatcacaaaatgaagtgagattatggtaaaaagacaagagacaaaatgtaatgtcattttttcagttccaatatttgacatattgaacatttctaatgtttttttagaaacgtttgcttgataatgtataggcaaaagtaatgggagatttattattgaaagaataaaaaaaaatattgttaaaacctttaaataccttaacatgaaaaatgcatccaagcctttttgggataagaaatcattaatgttagagttaaacaatgtggtaatccagtttttgttaaaatttctcttttgtaaaagtgcatttggttgatatatggatttgaatatattcctgaaaatagaaaataatattatttgaaatataaaataggaaaaggagatggacagaccttcaataaaagcttttaacgttatcccttcttggtattgagcagaacctgttcttgttgtatctgcaaaatatcttagaattgtatgcgtcacaaaaagcaacgagtttctatggattgttgtcacatttttaatatataatgaactggttgtatttgaattttgtgaaaacattactttttaggacttctgttttatccaagtttatattaataaaatttgaatatataaaaagttttcataacaaatactgtttgatatatgtaaatatatatatttctacattagcttgtatgttttgcggcttttttcaactcatattatttttttattcatttattgattatataaaaaattatagcaaaaaacaattattgtcatatatctaaagtgtcaaaaataaaaattgtattttttaaatattgtgtatgttggaatcgctaaaaaatataaacagagaggtttatgtatttatttatcatttaaatttcataaaaaacccgttgtttaatattctagtttctgttttcttgttttagtagagaaatacttaatcttctctcaaacaaactgtaagaaagttcatataagatattattagttattaagaatcattcaatcttaacgtatatgtaaataaattttattttgttgcgttaaaggttttcttaataataataagtataggtagttcgccctagccaataggttatgtattatataaaaagaaaataaactaatattaggcatttgatctacaaatgttattaatgcatgtttttattactctcaaagtataatatattgtaaaaagccttaattggaaatcctgaaatacgtagtatgtgggtaacgccaaatattgaaagacttggaacaactgaaactctggactcaatgttttgagtgtacttgaacaaatgattgatcgttggataaacattggtaacaaattactgagaagcttacttaagagacccttgattattgagagatagtaccaaaggtaattatcagcattgacattcgtattctattgatgggttcaacctagaggaaaaacaataataataacaagaatatcgataataactaggattaacctattcaatagttaaaatcagtcaattatatgatttgtaagcgtttatatacataatcaatatttatattttaatatattgcttgtgatagccccttacacagttatttcataaaatgatttgaaaaggtttacgtaaaaaagttttgtttttttttatttttttgtccatttttaaaagctaaacataaacaatattcaactactaataaaaactattataatttatattgttaaatttcaaatgagaaaaaaacgtatgtcatacactttaattttttcaaaaaatgcaattatatttgatgttcataacaacacatcaagaatacaacatagaatgctatgaaataaccataatattaggattgaaaacagatgttaagaaaagtttgagaaatggtcattcatattaacacaaaacttcagagtcaaaaactctatcaaatttcattgcaagttgaaatgacaaaataatatcaacttataataagatgttggtagtattacattttcttaactatatatagtagaatattagtagtattataaaaatatcttagatatttgcccctttttgttctaacatagctaatatacaaaatataataatatgtagtgtaactcaatccattttcgaattctcttttaattacttttataatttccagtcatttagtacgatgaatttagattatcaataatatttttaatcacattggaacaattcaggttttataatgtttgtcaataaattattctaggttgaaattttaattttaaggtttatcagaaaattatatgttgaatgtttaagtaaataaaatgttgaaagtgttggaaaataagagctttattactgtcattaacctaaaaaccgatttttaatccagtttttattatattttctgcggtacataaatacgccataatatgcggaatacattttattttccgccaagtgtgttttccagagatttgaagaaaaatgagaagctttaaaagaagggttaaagtaaatacaagaatatataatgcatgctgttggaaaatgagagtttattactgtcatttccataaaagttatttttaattagtttttctatatattatgtggtgtacggatgtactataatatcaagaagacattttatttttcaccaaatatgtttttcatagatgtgaaaagaaatgcaaactctaaaaaaagattcaaagtaaatataagaatgcatactgtatccactatataataagtatatacatgcatttaatacaaaacacaacaagcatctataacttaacgatgtctgccattaccatggacgccgagggctccaaattccaacacatacactatatgataagtatatacatgtatttagtaaaagatataacaagcatctataatttaatgatgtctgccattactatgaacgctgagagcacccaatatcaacagttctagattcattcagaatcttatataatcttgttggtgataactactctgttatgcaatatccattgttgtagatcaaccttgaaataatgattatatagaaaaaaacgataaaggttgaaaaatattgttagggttttgtgatagttgtcaagaaaaagttctagtttggatttataggacttagggtttgttgataaatcccatgtgattgttgaataatatgtaacaaaatgaaacattcatgaaacattaaatagctaattaaggagaaatgtatctatggtgacaatcgttacagaacctcaaataagaaactatcaacccatagttcatatataaaggaccagtattttggtatctaaatttatatgtttggttgatttataattatatgtagcacattgtataatataaaaaaaaaacaagcaataaccccttaaccctcctagttatatataacgttcttatatatttgttattgcccttactattcgttcaatagtactgttaaaaaaattgatcctaagtccaaactataacaaccaccgccggaggtggttccttggcccagttggttaaggcaccgtgctaataacgcggggatcagcggttcgatcccgctaggaaccattctttttgtagattttttaatatctctatatgtaataacccttaggttatgtgtttctgataacagttaatcttattgaaatctcaataatatttcactcagataaatataagatatagactctttctatatctctagatgtaatattcctatatctatccaagtgaagtattattgttattctaacaagattaattgttatcagaaatgcataaccataagcttatcacacttttacaacccataatttttatatcttgacctgtatgtgaagatctgtcacatgagatatattcttttggaatataaaatataataaatgactctcgatttctgtctatatatgataaataaactatattgtacacaaagggtaagctaacatacacaatatatggatatatatacatttatagattcagaacttacctggtctagaagtaaaggtacacaactgaattattagtatagtaaattttattatttttaccaaccaaatatacaaagtcaaaccttgaaaaattcattattttacaacacacacatgcattattcatagtctcctatttatttgggatatttagaagtagattaaattctgtattttgatatattcatagtattatacactattgattatctgctctatctagtaaataattctgatttagtaaaaatatttatttatatcattttttccctttcttcttaccgctttttcctgactttttacccctttggcttcttaattgatctttaatacggtctttttgtgttttcttatacaaccttccacctacttctaatgcttcttctctcttcctctttttgctattaaccgtctttttctgcttagctaatacattaagtactttagcgttcttcttttctgcttcagtttggaaccatgttctcttgggtcttgcttgaatttcgtccttgtatttcaacatgttttcacccttttttaattccatttctgctctcaatatttctttttcttctttttcttctaccaagatttcctcaacaacgtctttagatttatcaaccaaactattgatttcttctactttactccaattaacatttctacctaatgctcttccagaattgttattggttttatttgtatcctctacactttttatagccgccctaactacgcttctttcttgagacgattccccaacaaaagtgacagaacgaccttctctacctgctctggcagtacgaccaactctatgtaagtaaatttcataggtctttggcatatcataattaataacaacctcaatctttggaatatctaaacctctagaagccaaatctgtacatatcaaaaccggaacttcaagacttttaaatttcttgacagaatccaaacgttgttcttgtgttaaagaaccgtgtaattctgccacactcatacctaacaaacctaagataattcttaatctgtgtgcagtttcttttcttgcaacaaagacaacaattcttctttgtccctgtggatctaattctcttaataaactgaataataaggcaggtttcaaatggtctcttttacgaatacgaacaaattcctgagttaatctagatgcagcctgttttggtggatcaatcataattctaacaggtttttttagagacaaagataccaactgtttaatcttagaattcattgttgccgaaaataataatgtttgtcttttacctggtaacaatgtcatgatttcttttaattcatcttggaacccttcttctaacattctatctgcttcatccaaaactaaaatttctactgaatcgacattaaatgaagcagaatttctgatatgatcgataaatctacctggtgtagcaataacaatatcaggtcttgtctttaaagcttgttcttgttgtcttaaattcaaaccaccaacagcaagaccaaatgttaaaccactaacaaatttaccaattcttttggctacatctgaaatctgaatggccaattcacgagttggtgttaacacaacaacccttgtagatgcgattttacttggtttaaataaaagacgttcaatgattggaatcataaatgcggctgtcttaccagaaccagttacagccccagcaataatatccttacctaaaagagcaattggaatagtggcactttggattggagatggtttaacataccccaactgactcaaacccttcaacactggacgtgataatgataatgaattaaacgttttgtgaatttgttgttttgcttcttcaccttcagtttctggagcataaaattcagccttagcctctgcagaatcatcttcttcgtcttcctcattatcttcttgttcatcgatgcctttatcgtcgacatcatcatcccctgatatacttgtatagtcctgattggaatcagtttcggaattctcattttcatcttcatcactttcgttttcactagcatttattggagcacccatcccaaaaccatccatagccaattcatcatcatcttcgtccttatcttgatgtgcttctggttcttcctcactatccttctccttttcatcatcatcatcattatcggattcaatgtgagccattttaattagtccaccttttcttctaatgattttatctaaatcaacatcttttttatcattgtttgttccattatcatcattatcaccgtcaaaattccaaccatcaaacttcgtatcatattggtttgaatcgtctaaatggaatgtaaaatcagtattaatatcctcatgaacatcttcatctaattcctcacgatttttatttttattttttgttaaacctttcttctgttctttgtgattagtggtgttaactactacagaagaacctaattcttcatcagatagatctaaatctggaacatcttcttcactatcactaatagttggaataaaatccaaagtatcaaattttttcattttataaaattagaaaggatgaaagcaatcaattaaatatatgatatacaataaaatataaagtaatatgatagtgctatgtatggcagtgatagtggaaactattctaatttaattccagttgttgacatttcacttttgctttaaaattatattttatatatcaatcctttcaagctcatctcatattataattttggtctatataaaaaaataatttttagctcatcgcattgcatggcaaaaaaaaaaattataaaaaaaactattttaaattttctaacaacactattatcctaattgaatgaatatattttttttcttacacaaaaagactaaatcctcgtaaatgttatttttcacgaaaatcgatgattactgtgttttcttaaaaatagtgcgtattctgttttattgtctatgaagattactttctattgttttaaccaagcaaaaagatattgtatggaatgcaaatatatatacttgaggttcaaatcacgctaacattgtattctctacgctctatcctaatatttagtcgattattttttttagaaggaaatccttctgtatctattgttttaatttcaaattaagaaatatatgcatatatattcgaaaaatatttgattaaaggtaactaatgaaatatatattctaaccaaaaaccttgaactaaaaatcgttaaaggctgtaatataatgtttttaattatattaaattttatagaaaaaatgaaaatgatttctttttgattggctttctgattttcatttaaatatattcttttctttacctcatgtaaataaagaaagtttgatacgtttccaaaaagggaaaaataataaagataataagataaaaaacatatatatataagaaacgaatattttgaaaatatttcttcttaatattttagccagtaattacttaacaaggaacacccacaaaagtatttttcagcaaaagatttataacctatacaaaatgatctaattaataactactatattattaacaaagttcgatcaatcaacaaggaacaggatgaaaagacagatgaccatatttctgaaagagttccaattttttttaagatggaagatgaaattgaggaattaagaagaagtaagcttcattttatgggaaccttagaaaaaatagataaagaagtattatatagaatatataaatttgttttaatgaaagaaaaaaacaaatctagtttagtgcttctaatctttttgtggacaatacttatgacgacatatatatagtttatgaaaccatgcagctaaaatttaatggaaaacaattcattaaaatgaaaggcaatcctaatattagatgctgttttttacattataaataacatagtaaaataaaaatagaaatacagacttaacaaagaaattaatcatttaactccattatctaaaacagttattagcaaaccagctgtctggtaaaaaacacagtaagatatattaattagttatgaaaaaaaaattgaaaaaaccaatattgataaaaaaagagttctatgctggtctggatctttggaaatgtgcctattatccacaaaaattcaatagcaaattttctatgtagccattaattaaacattgcattaaaaaatggtatatcaaaataacatcatttttaagttatatactctaaattacaatgaaattactttcactattaaatcatgatttaaattataacagaattaaaaatattaactctacttcaattagatttagagaatttaatattttgaatacagaagaaaataatattaccaacaggaatatagacggttttgatgatatgagcatcatatcaggggagagctttattttcaattgacagaaaattaaatcaaactacttaccagcttcatattactagtaataattcatataaatattgacaaaatatcctaaagtacgattagtaaataatgttattaaatttatcagcgaactaatacttataattaaatggtagcaggagaaaagaatgggcgatacaaaaatttttagaaaaccaaagagttttcttggcacaagacagaaatggaattgcagatatttttacaacgttgaaggattagttgacacatttactcgtttgtaatttagccttaatatgtttcgtttattttgatgtataattgagttatttatttatagagagtgtcagggagttgtctatctaaaactgcttgtttgtgtatacttatatatactgtttcttttatttattgtagttttctatagatttctattgttcaatataaaaacttttacctttcctattattgtagaagaaaacaataccgtttctaaaaggttagatttctatgtatctttttttttttccccagccacttaaaaaggtacgacactaaaaaaattacaatacaccctaattatatctgttttttcaaatatggaaataaagaattggacaaatataacctaactaaaaataaaaggtatcaaggaatattccctttttaaaatgattataaatattacaatttcattaaatgtcttggtaatcgagagagaaaaaagagaatatttagaaaaataatataaggaacacattataaaaaggatgaagacgttatgtatcagttcaactaacaatcaacactataaaaagaggttaaaatatttaaataggaaacatataagtttagatcttaccccagcaagaatacattacttatacatagctaagcaaaaatgtctgaatcaattgatcaaactaagaccaatccagaaaatacagaaaaaccaaaaccctgttgtgtttgtttagacgagaagaaaaagagagatgagtgtttactatttacagatgtcaataaagaagatagtatgattaaatgtaaagaatatatcaacaaatacaaagaatgtatgaaatcatatggatttgaaatttaaatatcaacttaaggtatgtgaaaggtacctcatttcccacttcccttaagtttttttttgtttataaatagtattatcagctgtaaatagtgatcgtttatagtatattcttacatatacatatctcgttaatttattatacatgaatattcaatattattttgatatctatatgactaaaaacaaaataaataagggtcactttaactacttcttatattcaataaattattatttatgcatatgtgtataatatatatgtatatatatatgtatgttcaagttcaactagataagatttatatacatattatgatgtttattattagcatgttgttattattgtatttctttttatttttatttttatttttatttttatttataagcatagtcatactagaattatgatgagaagagctgaacacagaaagggctgcttatggactgaatgattttaatgcttctactaaaggtttaccgactctttcttgtacggttgttgcccataaaacatccaaatgcgaatattcgtcgaatatccagtatttaaatattctaggatcttcgcacttattaaagtgatcgattaacctaaagccatcaaccaatttatccctatgtggtacaaccaataaaatctttggaaataaatcttcttcactatttgtaaaatcgaaccatcttttgttttcaggaaacaataaggttgaagagtgttgaataaatgatattttattaggatctggacttagccaccactgcattaatttgacagagacatagacaggagagaacataaaatgtgttgcagttttacccctttcccataatttatcatcccattcgaatacataggaaaagaacaagtaacagataaagccgaagaattttgtgccaagaaaccattgtcttgtcaacatcattattttgacaaacgatttattaccaaagacaagtgggttatctatagtttttgccataatcttcaaaattttagaatcgttgagtattaacggaccaggataacaagcaggagccaaggctatgaaggtgtcgactttagatctgatgtcttccacattattgatgagagctaggaaaatctctgctgtgccttgagaatgcccgacaagatgaatcctttcgtagcctgttttttcttgaacgaagtcaatcaagactggcaaatctatcttgtacatttcattcatgtcccaattccaataattcttatcgtttcgattcttttcagtttcatattcgaacccaatacggttattacctaaccagatatcgaaaccattttggttgaaatagtaggctaaagaattttcaccaccagatgcaaaggaggcactactttgcagtagtccatgaatgaacaacataggttttttatttgttgaggctgggatattcatgtcttttaaatgccataattccagtggataaccatctggtgtcatcacctgaaactcttcgacgataatattcagtttattgtaatagaaggataatgcaggaatcaatatatcatgctctctatcgttgattaatggaatattatgttgatttttaaaatcatcgtcatgtggaattatattcgattctaattcttcattattactattatttttcttattcttattattagtaatattcttatttttatcatagagattcgttaccaaatgattataaagggcacataccataataacggtaaggccggcatgcaatattataatagaaattaattttctaaattgatttctaacttctccaatgacttccatagtagaaagtagtgatgatgatgatgatgatagtgatagtgataatgattttattttattttatgttattttttatttatatctgtatttgtgttatatataaatatatgtattatctatatttctttatccatttaattgaactaaccaaaaaaaaaaaaagaagatcagatagtcagattggaaatgatagtaagatagatctcgatatgaatcaaaactatatgcaacagcggtgcaagtttcttatattgtatcatatatcaaccactgacataatatacatatatacatatatacatatatacatacatacacacatacatatacatatatagatatatatatatgagatttggtatactcataagcctctaactacaggcccgatccaaaaaaaaaatacaaatgaaataagatacaatgaaacaaaagactaaaagataaaaaaaaaaaattggcaaatatatgtcacagaagtttgatagaatagaaatcccgagaaaatgaagaggaaacaaaagaaaattctttggtttttaaacgagacaattgttttttgctttgtttttttgcagatttcaagtttcaatttcttgttttcttttgttttggcgagtttgtttttaatgcgagggtttggaaaaaaaaagaaagaaaaaaagaaaaaaagaaaaaaaagaaaaagattattagggttagaaacagtaatttttttcccttgctttttctccaatatttccacgtttatctgttattctattcttccctttgcaatgattgaaggaaaatcactactgtccccaaccagagaaggagaggagggggaggggggggggtttacataaaaggtgatgtagatagttcatataataatgtttatatcataatacttgttgacattatgtatgatgtgtagaaatgattcaaaaaaaacaacataattgttcagttagttgttcagctagttattctttttttttttatttttggaaagaaggaaaaaagaaggaaggaaagaagggacatatacaatacttttctaaagaatcaaaatctgtctgacactaaacacctccttccctcattctctcattctctcctctctttacgtccctcttactcgtaatatacatacgtacatagatagatagatagatatatggatatctgtatgtttatgtgttaattattgatatgtttattatagcaaacaatagaaagaaaagggaatggcagcttttcctcccatttatctaacatccgtacaccggacagacatttccagaaaatccaaataatcacgtgaccgccattaatcaaaaaaaaaaaactgaaaaaaaaaaaaaataaaacaacataaataaatggagaagaaagggaaagaggaaaaagttgcctttaagagagaaaaaaaaaaaaagaaaaagaatgaggaaaaaaaataaaaaagagaaaacaagagaggagagaagagaagagaagagaaaagaagagaagagagggagagaaaagattaattgattgattcattgattgattgataaacacatacatatacacataaatataaaggtataaaccgattattttatgtcttttcatcattattactatatacctgatccttgttgattaagcccatcggttctcttattcttttatcgtcatctttaatcttatctcgatagcaaatattactactactactactactacaactacaggccactacagaccactgctactactattgcttagactattttattcattcataatacctcattttcatggatccaaacggtatggatgcagaattggcatctattgtgtcctctctaagtgcactatctaatccaggtctgtctcaacaacaatactcacatggctttagtaacaacaacaacaacaataataataaacaactaggtggatttagaagttctagtttaactttaagtgacaatgaatcagatcttttaagtcaaggatcaacttcttatttagatcaaaacattaacaatgcctataatacagggtttgggttaggatcctttggttataataaacagactacctattctgttggcaccgctcctccttatgtctccacttatgccactaatacacaacataacaacaacaacattaatactaataacactggactttatgtgaatactaataattcttcttccacccaattaagaaacaaattgagtttattagatacatattctaataatttgaatatgaacactttgaactcaaatgatttgaattcatcgttcaataaccacaacaactataatactgtaaataatttcagtaacactaacctaagttatgataaagaaaattattatgctcacaccattcaaaatattacttcgagtgccacttcgaccactggatttttcgaaaaatttggtaaatccttaatcgaaggtacgaaagaattggaaaatgaagattctactcccaccattgttaacaccactgttaacacttctgctaatgatcgtatggataatgaatatttaaataccaccaacaataatactagtgccacgaatttaacaaaccaaaatgtttggaatcagtctacagtcccttcatttcaactgcaaaatagtgccatggttgataatgaaacttcttcacaaaatagcaatgttaatactaacaccaataataccaacaccaatgagcccaacatgaatgataatccagagagtttacaaaagaacgaccaaatgaagtctccaccattctttttcaatcattctatcttaaataacgggttcctctatggtaataatttctcccagtttccgttgggatctccaactagcttcattcctcagatgttttatccattgggtcaacatccttctatcccaccacagattccgccaaataacaacaatagcaatcaaatgaacaatactggtattccaaacacaacaaatattagccacgataaaaataatacaaccgtcggtactactagtattactgctactatcaacaataatggtaataataacgtaccatcatctatccctgattatagtttgcctgtaaataacaaaaacttaattgaatcaaatattcctattatcaacaacattaacaacattgatacaaatgacgctttacatgattcaaataatataggcttacaaggtgtaccaatgatatttacatcaccttcgtcaaaaccaatggccttgaatatgaatcatcatcattctcaaaaattgcaacaacaacacccaaataaaactacaactgtaaataagcatcctagaagtaagaataatgataacaacaataatattaacaatgatattaagaaaggcaatctatttaattcacaacaaattccaaatactaatcatattacaatcaatccaggcaatccatatttagatccacataatactactgttactccaaatttcatcagtaaattaaatgaaaatacattcaatagcaatttagatattgatgaatcaacaagacataaaactaccattccatctcaacaaaattccggttatcatagatctccattactagaagaaattagaaataatgctgataataaatacacattgaaggatattgtcggccacaccttggaattctgtaaggatcaatatggttctagatttattcaaaaggaattggctactgctgaaccttcggaaaaggaagttgttttcaacgaattgagagaccatatattgattctgtctaatgatgtctttgggaattatgtaatccaaaaattctttgaatatggtacgccaacccaaaaaagtattttagtagaaaattttaagggtagaatgaaagagctttctgttcaaatgtatgcatgccgtgtcattcaaaaagcactggaatttattaaacccgaagaaagaattgaattggtggtcgaattatctgattgtgtcttaaagatgattaaagatcagaatggtaaccacgtgattcaaaaggcgattgaatgtattccaattgaattattaccatttgtgcttaattctttgattggtcatatttatcatttatctacacattcttatggatgtcgtgttatacaaagattgttagagtttggtacaatcaaggatcagaccgtgattttagatgaattaaaaaatttcatcccatatcttttacaagatcaatatggtaattatgtgattcaacacattttacaacatggttcagatgatgctaattgtctaccaatgatcaacactaaacaagagattattgatattgtagctgacaatgtagttgaattttcaaaacataaatttgcatctaatgtggtagaaaaagctattttatatggtacaaaagaacaaaagaattccatcatttcaagaattttaccaagagacaacgaacatgcagccaacttagaagataatgctccattaatcttgatgatgaaagatcaatttgccaattatgttgttcaaaaattagtaactgtttctgaaggcgaaagcaagattttaattgtaactgccattagagcctatgttgataaattaaataacacaaatgctttaggtaacagacatttagcaagtgtggaaaaattggctgcattagttgaaactatcaaggtttaattttgaacaaaaaacttttttcttttatcttttgatatttttgttctattttattttattacatcctactttatttttatgtgttttattctctttcttacttctatttacttcaaggcaaagtatttgaatacatctttatttttgtttttattgattgctctgatttgttatattttattttattcttaactttattatatatattatataacattttgtaacataaacaattctaaaagaataatatttaattagttttattcatttaacttccccattccctttatttttctcttttttgataatttaagttcgttaacttacatacattaatataatagatataaactgattcttcaaattgttcttctcaaattgttttataaaacttatatgaaattatctgaataatttgtaaatactataatacagatatacatttcttcaaggacactttcaaataattccttcacttatacatgttccatgtctgtacctacattaatctatttccccctcctcatctctttctaaccaaccaatgcaaaactaaaagtccaagccatcacaaatccaagtagttctctgacaagatgttcaaataccaaatcattaaatacattagcataaaatctggagggcttccccttacaaatgaaaaggatatagataataatgcacccaaaatatattatgaaaaaattacggaatccggtaagagactcatattgcaaaatcccagtcactgtaccactcattaacgatattttatccatcacatttacatacatcttcttattataattcacattatccatgttctgtaatatcgaagcagaagtggcactgttcaaatctaccaccggattcccgttatcatctacattattcacactcattttgtattttttaccaaatgtttccaatagtataccttaaaaataataaatcactcacccaatcacttaatattcttgataatatattaaatagactagtaaagttgtattgtttcctgtcatgcaacgcatttttgtcaagaaggcacccttccttaaacaagttgtctagcaaacatgcctttctttcacacagattattgtatttcccaaaattatttctttctttcatttaagtctaaaaattttcaaattaaaaattttccgataattttttgaaaagtttttaaagatgaaaaagactgaaagtgaaaaactatttagcaagctcatcgcattttaaccttaaatcgaaagattgcactgacatgctagcctccgtttgatttgaccacagtctcctccatattcttttattactatattaaaacagcaaccttaaattatagaaaaaaaaaatgcctactcagctggaggaattagttagttttctacattcgccacaacctgctgtaagacaaattgccttagataatctagttgggtttagttcaggtccatcagcctctatttttaagtatgataactgcagagctattcaggatttgaaagagttagctaaagaaaaatcaaagattttagttcaacaatcagtcaccattttagtcaatttgtcaagtgacccagaattaagaaggttgattgctaaagaaccagatttcattagatatattgcttccaaaatctgtgatttgtctaacacatgtgcagatattatgtgtattcttttaagtaatttagctaaggaagatgctattacacagatcttcgacatggaaagaataatatttgatcatgaaaaggagttaaaaaatgaaaaacccatttttggtagtaataaaatcatggattgtttaatggactgttttgttaaaggttacgatagaaaattaaataaatatgcaaactttgattatctagcatatttctttgctgatattgctagatttaaaaaaggtagagaatatttcattcaccgtcaagaatatgatggtgttgtaccactttcaaagttattagtatttactgaaaaatatgattcgaaaacaagaagagaaggtgtagcttccactatcaaaaattcattgtttgattcagaaactcatgagagattgttaacagatgaagatatcaatttattaccgtacattctgttacctatagctgatgccaaggattctgaaatcgatgaggaagacatgtttaatttacccgatgaattgcaattattacctgaagacaagaaaagagatcctatcccagcaattatatgtgtccatttagaaagtattttgcttttatgtactacaaaggctgcaagagagtatatgagaagtaaatctgtatatccattaatcagagaattacacaagaatgtggaagatgaagatatcggtgaattatgttacagaattgttaatatgctaatgagaggtgacccagatgttacaactttcgaagagatgccttcaaagagtgcagaaactgaaccaaatattgatgaggatgaggatgaggatgatgacgctatgatagaaattgtctgatgttctgactactatagggcgatgatagaaattaaaatagaggaaataattaaacatttataaactcttttatataatatgcctctatatgatataataacactgtacaatataaaagttaattcctttcatttaccattactggaagtaaaaaatataatcatagaaatgatcttgattgtaatatttattcatttacttcatttttcaatatcgttttcaaaaatacaacgaaaaaaatacgtgtaagtttgcctcatatatgtgcctataatattatatgaaaccacgtctttatagtattgtttcatactttcttagttcagctaactaagatccctatcaatacaaatacctcttattcagtaattttctgttttcttattttttttttacagttttattttttcaattccatatgttcattatcaacttttctacaaagttttttaacaattgtaaacattagttttttattttcagcacccgggaatctctttctaatagctttaccaaattctttgacgtttaccttaccatcaccaatcgcatctctaatatcttgttctgtaattaatggtatatcggcatcactattttcagttttaatctttttagattcaggttcttctgttttaacaactgtagcggtagattctacggtagtattattcacatcatcttttctttggtgtttagaagtatttggattccattcgcctgcaggaaagttccttagtaatttcttatcaccttttaatataataacgcaatctttaatacttttgacttttaattgaggctccaacttagctggtgatttctcttttttaatttgaggagattttgatttctttgatggtgattcattaccgcttttatccttgctgttttctgcatcttctttcttaacctctgtattttcataatccgattctgacaaatatggattaatttcatcatctgatgaatataatgcagctaattcagttttttgtagtgctttcttaattctctcaccttgttcgtcaatcttcttttcattgaacaaatcatctttcccatcatctggaacatcttcatcatcacgaagacccatagcattggcctgtaacatctccttcttaatacgttgttcagattctttattttcttgttcattaccgtcaataattggagcttcttcatcatcggcaaattcttcatcataatctaattcgttttcagaattatcatcatgttcttcctcgtcatcaccaccaacgctacgttggtctgcgactgccttaagtcttctccttgttctatcatatctagtagtggtggtaccaatattatctaaatgtttcattaaccaacgtggaacttccccattctttttatccattctcttttctgcttcttcaatggtcaaagtagcatatttgtttcttgcagtaaatttataaactttatcagctggaatcatagtgaaactaccatcgtcttccacacaaagtaaaacataagaatcagagttacctgcctcataagaaccaacccatgtgttataaccatcataatcttccataacccatggataaaattcttcaaatctcaactttttggcattttcatctaacactttcaattgacgtgttttacgttttgagttaactcttcttgcacgtccacctccatctggcgcaacatcagcaaatggatccgtggttcctgtttcaaatgtagcatctgggtcttcatgaccatcatatttaaccatacctaccttttctggatgttctgatatacctgcttcctctaattttgtaatcattggaatcacttgatcatttgattgagcagcagattgatcagcaccttgtttagtatctccattaggtatgttaccagcactattagcatcagtggaactgggtgcattagcagcaggcttagaagtggaagatttggatgcactgctagaattgctgctactaccgtttgctacaattggtgtaccatgtaacatagctgttcttacaggagtagcattacgaccactggaagagttgcctctactatggctatttgaatggtcattgcgcttctcttcttcctgttttcttttatattcagctatttctttttgcctttgtacaatttcagctcttgttaattggaattgcagatttcttgtatcctttctgtgcaatctaataggtaaatggaacgaatttttaaactcaatttttttcttgctttgaaattttaataaatgggttcgcatgttctctaatttttccttcgatgtggctcttagaggaaactcattaaattcttcattttcctttttcaccgatgaaatattattagtagcgatctccacccccaatagcttcttctctctagcttcaatttcttctggatcctcctttttaatattgattggcatggtggaccttgcctttttgaaagcccttctaaatctatcctttttgataaagggagatactggaccccctccgctgctatgggcagaacgtctagaggtagacattgatattattatttgtgtttaaatttatatttcgaaaaatccttttcttcttctaacacttcacttcgaaactttcaataagcaaaatatgtaggtagttggaattttatacactatttaattgctgattctcagctgaatcaaccagaatgataaccagtgggatattaatgtttatcaaaaaaaaaaaaaaaaaaaaaaaaaaaagagggaaggaaaggaaagtaaacaaattacctgatttttctttctttacttttcttctttataataatcaactactaattactttgttcctccttaaagctttctctggattgataaaaatacatacttttatctataattgaagttcatacactcttctctttttcatataaaccttagatttaccaaaatgtttaatatttgatttctctcttgtgatggcacatcactacccacgaaaaattgggaaagaaagggaaaaagaaaaaatgaatgaaaaaaaagaactgttttactaccgagtcatgtggtgatcgtgtatataggaataaaacaaaaataatgaaaaaaaatcaagagatacgtttaaaatttaatctgtcgttgaaactcatgactgagattatgatcatggttatatgatagtgttgttaatacgtgaattgtagttaaacttctttcatgttttcctatatagaaagcatggccaaaaaaaagaaaggtctttctctctttttttttttccttttttttttcattatttttgttcctaatgcatacgcaaagatttcaagttttgcacagaacaatttgttctcactggtcacagaactactatttttttaatagatatgttagatattttgtgcaagagccatcataagtaagatacgaaaatatgggtattaattttatttataaacatttataaattataaacttgttgaatctgacaaagtgaaccaaacatataactcttattctcgtttgcttattattgataaatctaaaaaaaaaaatacacacatactttttgtaacagctaatttactattacccacaagaaccagttttcttatctcattgaaaacttggtaacaccatgtccagtgaaaccaccatcttcaacaccagagatcacaaaaaaaaaaaaaacaaggaaacctaggaacacaagtatagttcagcatagacaccctgctacacaattaccattcaagtgttccatatcctggcatgttactacactcctacattttataataccctgaataactttattataccagggattttcttgcttttcttgtttttctacccttcagggaaacaataaaggcgctctcccttattgtttttccatgcaaaacttttttctttttttctttttttttttttgtctatacgacagatcatgtgactgacagttacccgattgagaaaccaatttaaatgaaaaaaaaaaaaaaagaaacacagagagaatttcgtcattggccaagaaagaactgaatcatttgcaaaaaaaaaaaaaaaataaaactgatggggcaaaaaaagacgtgcgtgcgtaatatcaaaaacaaaaaaaaaaaaaagaactaaagaaggaattttgggaaaaggaagtggatgagttaaaggaagacagtccacaagactctatgcagtttacacagaacgtattttaactagttcaaaaatacatagatagatagacaaaaagggagtaacttacacgcatttctctaatagttctgtaaaaaatcaaacaaagaacaatacacatatagatatagatatagatataggtatagatatagatatatgcataggatatctctgcagaattgccatctgataacatataagtaaaataataatataggtggaattggttgtgagcaagcaaaacagtcagtgaaaagaaaagaaaaaaataacatgaggacaaatatgggcgatcaagatgatttaagacttcaaatacgatccactttgatgtctattcacgatatcgaatattttagaaatgtaagggatccaacaaagagaacagaaatggatcgtgttttgaaacaattcgtattcaaatatctttatttcttgatcacagattcaggcagatacttgaattctttattccccaacaaaaattcgtatgttaccagtctagatcaagtcttcgacgtcaattttgtcaccgatttctataagattagtttgaattcaattaataaaaaccaaatgtttagacatcaaggtagaaactgtggcagaaaatttaaagtaggcgaacctctatacagatgccaggagtgtgggtacgacgatacctgtgtgctatgtatccattgttttaatccaaaggaccatgaaaatcatcatatttatatcgatatttgcaacgacttcacaagcggtatctgcgactgtggtgatgaagaagcatggcataataaattgcattgtaaagcagatgcagatgtagaaaacaaagtaaataagaataatagtaatagtaacgatgataatgatgaaattatgacggataacccagatgttaatatagacgaaaataataacaatctgttatataatgaacgacttttagaaatcgttttatccgaaatattcgattattttattgatgtgttcaatcaaagtatcgaacctttaccaacattcacctcagacataacattgaaattaagagaaatgattcaaaatgataacaaagatttaatgtatgagtttttaaacgacttaagttatagaaatgatggaattgaaccaagaatcggaaaaccagaaaattatacagtaatggtttacaatgatgagtaccataattattctcaggctaccacagcattaagacaaggtgttcctgacaatatccacactgatatattgacttctaacatcgacagtgaaggtagagcaatgctgaagtgttcagaagatattcattctttaacagatggattttttgccgtccaaactaatgggttgagtgctaccttaatctcttggagtgaatatatccatcaagaggcttgtaagtatattgtacaatggtgtaatcattgcttaaatattccaaatcacgatttccaaacaatatttagagatacactaggcaaagttttatgctcagaatatccctgttataaagaaaagactaatatgtatgacacaatctctaaatattttgtaaacaaattgtcacctacaaacccatacagatgtctagattgttcaatcctcaacgaagaaaatagaattcctattggtcatcataaaagagtctctcagtcagatttgacttctatctctaattctttaaataaaatagaacatgtaatggacagaaaatatgcaaattcaagacttcaatacatcttattttttgataacagatattggaaacggttcagaaaagatatacaaaatttgattattccaacattatcctcatcagtaacttataagccagttttttgtgaacaattggttcaaatattcaaccatttgacaaggtctataacgtatatggatagagaacctcaactgacagccttaagagaatgtattgtccaattatttacgtgtcctaccaatgcgttgatgatttttaatcatccaaataattattttattgatattctatggtccatcattgatatatttgttgaattttgcaagtttgagaacagtactttaatatggcaaagagtgcaaaaatcaaatccaaccatgagttatggcatctcatttaaacaaggattatacactattgaaaccttgttaagcaaagttgaggattctagtatgattatgcaaccaatggaatttatctcattggtaaccctatgtaagcttttcaatggtgcatggaaaattaagcgtaaagaaggtgatcatgtcctacatgaagatcaacatttcatcccttatctagaatacactacaaccatatattctattattcaaacgattgaaaatagattggttcacaaaccatgttctgaacaacttttattaaattgtattagtttactgaataccttcttaagtcataaatccttgacatacaaattggtaaataatacccatgaagtagttaaattcgtagttagtaatgatagagttgcatttatgaatcctgttcaaacactgttctcatttttgattgaaaaagtcccattacataaagcgtatgaagcagtcatgtattcagatgcagtgtcaagtccaaaccctgaagaaaccatttcagaaaggaaatctgttttcgacttcttaaaaatatctgacttttcattacgttccgttgttttatgttcacagattgatattggattctgggttagaaatggtgtctctgtactacatcaagcttcatattacaaaaaaaatcctgaattgaattcatattcaagagatatacatttaaatcaactagcacttttatgggaaactgatgatatcccaagaatcatatacaatatgcttgatagatgggaaatgttggattggtttacaggcaaactgacatatgacgatacagtatacaaggataaaatctcatcactaattcaacaatttattacctttgtttatgaagtattatctgagagacaattttatcaaaaattcgattcacaagaagaaaggcaaatggcttttattaaaaatgccattatctatagtttatatcaaaaaccattaccttattcaaaacttttaagactcgtccctgactattacacggaaaatgccacagattttgataaagctttatatgaagtatcaatctttgttgaaccaaagggattagctgacaacgccgtttttaaattgaaagatgcatattactcaaaaatcgatccactaagattatccaaccttgggaatgagtttgaaaatagtgcaactgttataaaaacacatatagccaaaactaaacaagaggatgtgtcaaaaataatattacaaccacagttgatatctcctaaacacttggatccagacgttaagcatatcggtgatttcacacataacactgtttttgttaaagttatctataaattgttacaaatttcactagacaaagaagataccacatatttaaatgaattgttacacttaattcatgctatattcaaggattatgagcaaatccatggtaagcaagctattcctgagacatacatacaattaccaatttgcaatcttttcttatctatcgttaattctaaaagtgcagtcttttctgaaagtattgtaaataaagcagattatttgttagagaaaatgataatgaagaaatcagaggaaatattttctatattaacctatagctttggtaaagattgtgtagatacatacaagaaacgtaaactaaatcaaggtatcaaccttgaagagacagagagagaaagaaagaaaagattagctaagaaacatcaagctaaaatgatggccaagtttaataacttacagagtaaatttataaaggagcacgaagaagccttcgaagaatcaaatatagaagaagatggtgatgttgatatgatgcataaagaaaaagttatggagggtgaagaattcagttgttcattatgtcaagataatacatctaatgatacttttgtcattccaatatatcaagattattcacctgtattccgtccttcaaacatttcaaattcgcatgattacatgctaccatggaatggtttttataataacaacgatctttctgggatggtccaatccccttccacaattaaaagcatgaaacaatttaataaggataattctagaaaagtttttgtttcctgtaatcaccatatccactacaattgtttcaaaagatacgtacaaaagaaaagattttcattaacttcatttatatgtccactttgccaaacctattcaaattgtgtgataccaattttttctggagtaggattttcaagagaaagatcgacagattcgattacaaatgacgcaggtgaggaagttttaaccttagatttcttgttaacacaaaattgttccctagaaatattaacaaaagccttaaaacctacaagtgctagtgatgccaagaccctttactctatatttgaaatgatctttaaggattctcattcgtttgataaagaaatctcaaggagcaaagattttaataaaaacaatacatctgttatattagcaaaccattgggcaaacactatatcaatgctggaaatctcatcacgtttggataaaaatacgaattgcgactttttgagcaacaaagagcaaaaattcaaaactttaaggaatatgctattaaccataattttaatgtttaatattattggtaagccagaaaatgaatttgaaccatataaagaatctaaccatcctgtggaaaataaagtttttcaagatattgtacgcggtgcattattctttaataatggtaaaactttgaaacaaatcatattagatgtgctattgagctatattaagaccatcataaagaaagtagtttctagtgatcgttttactaaacagacaatgaatttccccaaagatgcccaattttatcattgtaatgaaggtgtgaagcaattatttactagtctaattagtaattgtgtcatgatgcaagatggtttaacaaattatgatttagcatattcatgcattttaagacatctaagacctactttaaggagatgcttaataatgtttaaagtattttataatttgatcaatgataatgattccaagacatttattttaggcagtataaatttagagaacatcacagattcttcagaagattgtttacctcaatatattgataagttggttaatatcactacaccagttgagaattttgcacagctgctaaccatcatcgttaattctaaggattctatggaaaatgttaaggagtatccaattgagaattgtggtataattaaattgattaatctttctgagtatttaaatacatatgtcacaaaagcaccggaaatgaaattacgcgaggagaatcaacatgttaaaaacagtaagaatagattagattttaagatatgtttgacatgtggtgtaaagatccatcacacaatcgaacaccatgaaatgactcgccacctaatgaagcattgttttcaatcctttggtgtttttttattgccaaatacatcagagatatgtttattacttactatgccatcttcacatatctttatatcagccccatatttgaattcacatggtgaagccggccgaaatgcaatgaaacgtggtgatttgactaagttaaatatgatcaggtatgaacatttgaataaactttggatcaacaatgaaattcctggatatatcagtagggtgatgggtgatgagttcagattatctatattatccaatggatttttatttacattcaatagagatccaagagtaagacgtgtaccattcgtgaacaatagagatattgatgacgatgacattgaagatgaagatatagagatagatatagatgaaggagccgatgattttggatttgaagaaaatgcagacgaaaattatgatgatgatgaaaggggtcttggtgttgaagacgatagtgagagcagtagcagtgatgatgatgccaatcaaaggggtttcagagggcctaatggagctacaacggtaggagacgtacgtaatttctttcaaatttttgaaattctacgtaatggaccagacgctaatagagacactcctggaggcattgatttagctacaccattctttgaattattaggagagcctcaatttccaactgaaaatatgcagccagaagctatgaatgatgatgaaggttctgatcaagaacaagagactcaagaaaatgatacatccgatcacaactagttggatgcggatacccagctaggcgctcaattaaggatgtatcgcaagacgtcaacctgacgttatgactgtactgttatttctatacaaatgttataaataagtaagtaactatatgcaagatagacaagataagcaaaaggaaaaaaaaattaatacatatcgttttaatttgtttagaacattcgagttccataaattttggccaataaagaggaggtattttcgaaaaatctccgaaaaaaccctttcaccaagataacaaaaacagcaaagaattctactttgtttaggaagaaaaagaagatgggaggggagggactaagaaagagcaaaaagagaaaaaaacagcgatagaacggatttaacagaagagatggaagcgaagagggaaatgattgcgttttcttcacacacataatattgaaactcaaaccagctaatttgtagtttcgtctaatagccccattagtatatacatttcacttctttcgttgtctgttagttgcgtacgtgtgtgtacgcatgctatttgtgtatatttattgatattcacctattactttcaatactgatagtgttagtgactttgtttttttacttttaattttttttattaccgttgctagtttaaaacaagttgcaaacattctggtacgatcaccaaatagaaacaaaaatttttaaatatcaactcaacaacatccaatatctgttaataaaatataacaagaagcaaaatggtatgtttgaggttaaatggtcagaaagatttctgcatgcatatttatatatgttgagtgctttttctttattactaacaaagaatttgaataattataaatgtatgtaataatactgtaccttatctatctgcctttctatctgaataaaacaagtccttccaatctctatataagttagtgttcagaagaaactccgtatttataggatccattttcctcggtgcattagtcttccaaactacatttgatgtcggtatcaataagttttggagcacatacaataaaggtaaattatgggatgatgttaaatataaattagaaaatggtgatacagaggaagaataatagtaatagtagtaataatgaccacaaggattttttttctatctattttatatcccttttttccaacaaatatcaaaaaaataaaaataaaaataaaaaaaaataaaaacgttataaaaaagaaagagagaaaagaaaatcaaaaagagtaaagcaaaagactaataaatttatatctgtatatatatatatatatctgtatgtgtaaaacaattttttttttcctattttatttattctatgaatatatattcaatccagtcccatatctatttatttgtttgactcttttatcctattaatgtatgtctttgagactatgttccatgcggatagataattaccgagacaagcatctatacaatgatcattattcttggagtatggagcgaagagacatttattggcacaaatatcggagctgttatctatcaactcttgtgcatttacaatagccaattcttgtttaatttgttcttttaaagcagctaaactagacatattgagaaagttattctaaggaatgtaagtaaagattattgtacttattgtggttgtggtatgttgctcctcattctaaaacaaatacatataatttattttttaaaatatctacaatcgcagactgacattatatggtaaagaataccagtactgataataatactaatactagtactggtactaatattagcgtgcttgttatctactagttataaaagaaggtcaataaagatctaaatataaatcacttcaagaaaaccacttggtatcatttgatacgacattagttagtctgtgtcctttttttcatttgttttttaaaaatacccattatacatcacttactacgacaatttcaaaaagtaaaataaagtacaagaaaaaaaaaaaagaacctggggatttgttttcaatcttgaatcattatatatcccactctacaaacccaaagaagtatcattttatagaaataaattgaagataggtctttagtgaaaaaaaaaaaaaaaaagagtataatcttgtcattggcaacagaatatcattttaatcgatgagatgattaagagaatagaaatccaaagaaagaaagaaagaaaaaaaaaaaagaaaagacaagagaagtcgaaaaactaatcagtaacaatactctgttcttttgatttttttgatatgtatatatattttcttttgtctttttgtctttttcacttattttgttcgtttgttttaagtactaacagttgtttttgaagaaaaacccgtcatcgtcgttggttgctagtggtaacaacataatttccgtataaggaaatatgtgggtcaaagtagacacaatccaagtggaaacaaacaaacaaacaaacaaaccaaaagaaaagaaaagaaaagaaaagaaaagaaaaacggcaatgtgaatgggaaaactacatggagacataaccagattgtaaaaataaaaaaaaatgaaaaatgaaatacaataaaataaaacgaaacacaagattgttttctctttctgtattattgtcatcttccccaattttattgtgatatgttttgatgttgtcgtaatttatcatctgtatagttgtggtgcaaggatgtatactaccttgacccactcgttttttttttcatagcttttctttttcatttccattttttatttttgtatttctatgccttcctcatctatttttaagggcacttaagggaaaaacaaaagagagacaatgccaaaaggaaagggaaaaaagaaacgacaaaaacaaagaaaaaaaaaaacttgcgcggcagattaggaaattttcgttgtgaggattgttgctatgtggacgttgcaaaaaataaaaaaaaaaaggaaaaaggaaaaaggaaaaaagaagaagaaaaaaaaaaagaaaagagaaccagaataataggaaaatgaaaatttttttttattccatttttttagttccattttctttttttttctattatttgtttctgtgaaataagacgcctctaataaattatcatcgtctttcctcttcttcctcctcctcccccccaatgtgtaaagttttgactattgaattttatttattgtgatatcttttattctattttttttttcaattcccagtcattctcgtaaatgttttcagtgtattgtattatttccattgtattggtgatttttattagatagttttgcccctatttttttcttttctttttctttttcttttttcctttttcctttttccttttttttttttattttcttctccccttttcttcttttctttctttcctttttttttttttttttttttttttaaagatagattagtagatttctttgtacacacacaacatttacatatataatacttacatatacatacacacacacacatatatatatatatagactggtttggatttacctttttattttctatcttcttttaatccttgatctactcttctttctcctttcaatcctaatatatatacatatatataaccaaacatatatatctgagtacgcagatacacatccattcacatacacacacgcgtacataaatatatatatatatatatattattattactattactattattattgattattgattattgattattgattaacaatggcagaagctcaccaacaattcttagctaagtttgaaacctctcgtaacgctttaagagaatctgaaaaagatgaaattttattgattgaaaataagcgtagattcgttatgttccctatcaagtatcatgaaatctgggctgcttacaagaaggtcgaagctgccttctggacagctgaagaaatcgaattgtctaaagacgttgaagatttagactctggcagaatcactcaaaaacaaaaagacttcttaggtaagcttttggctatattaaccgtcaatgaagacaccgttaactaccacttgcttgaaaaattctctgcagaattacaaaacccagaaggtaagtccttctacggtttcgaaatcatgatggaaaatatctacgacgaagtctactcctttattatcgacgcctactttaacggctccgcaaatgtcgaactattcaaaaccattaaagataacgccgctgcaaacgaaaagatcgaattcatcaacagatggatccacgatccaacttctctatacgccgaaagattagtcgctttggctgccaaggaagccatcttccaagctggttctcatgctgccatcttcaacttgggcaaacaaggcttgattccaggtttcaacaaagcaaacaccaacattttccgtgacaaaggttactacactgacttctcctgtcttttatttgcccatttaaagaataaaccagaacaagaagttgttaccaagatcattacagaggccgtcgacatcgaaaagaaaatcttagccgaaactgttgacattaaggactccgggttagatgaaaaacaagtcttccaatacgtcgaatacttagcagactctctattattatccttcggtaacgagaaattctacaatgtggctaacccattcgaattcatggaacaaactacctctatcggaaagtctagattctttgaaaaacaagtctctgacttcatgaaggctaaccaaccaccacaacaagtcgctgctgctgaagccttcaacttcaacgaatctttctaagtgatagtaatgttacatctttcaatctctgcactatttccttcttctcacattgttttatgcaaaaaaaaataagaataaaaaaaaattaaagtaaaataaaataagaaaagaaagatattattttcacttattcttttttttttttttttttttatttatttctattttttttgctgacatctttcctaatgtacacacacatatacacatatttaatcataaatattaataatatatatattacacgagtgtagtggattattataccaatatgaatatataaaatataataattttcttttttttcccccaaaagaaaaaaaaatacatcaaatatatatagtttaaatctaacctgccatgtatgcaaatataatcgtctatgtatgtgttcttagcaaaatctatccccatgtatagtaataggggaccgaaaagtgtttcttcttccttatttctctatgtatattatgttataccgcagcatgcaaaaggcagtttaaaatcttcatttatgataattaaaagaataaaccaaaaaaataaaaaaagaaaaaaaaagagaaaaacatattgtaaaacatcctctatctttaaagtaatatgatatacattaaaaaaactaaacaaaacaaaataaaacagaacaaaaaaaaagaatacgcaatatacaaaacagctaactgtgtaatccctattaataattgactaatatacatctgtaaacacatttatctgtatgtctttgaagacactattctttttttttttatgttctaaatgagtaaaaaccagttattttatcgaagtgataatgaatctacaccatcgataccaccaaactctataccactgaattcaccaccacaaattttatcatctccatttttgaaaccaaaagttcctttagtaacgcgatatgcaaagattaataaaatcaagaaacctacaaacaaacctagtgctcatcataaaaataaaacaaataaagaaacaaacagaaccgcttcaaaaaatggaagtatctgggatttgacaaatgtggcatcaaataaatttactcaagagtttaagatagataaaagtgggatcagaatgaaggattataaatggggtcccatatcgtcgaatttagtcgaaattgcattgcagccatggatcaataatatgtacgattccattagttctggattatcagagtactccaaaaaaattgacaattttttaccaaaagtccatcaagaccaagtaggcgtcatgaaacagaaattaattggggatatcgttaaacagattagaaaacagttacataaatgtgttttccctaacgatacaaacgatataataagaaatgatatagatccagagtatatttttgctaaaaggaaacatattcaaagcttaatcgataatatgaccaaagaggttcatttattaaaagaagaattaaaaaaggagtctaatcaattaaacgaagctaagaactttataaggaatttgaaaagaacaaatgatcagcttttaaagcaaaatttactagaccaaaccttacatcctttagtaaataaagttctacaaaatgaatatggtttgattaaaattgatcaactatcaaagttgaataacaataataataatgagaaaaaagaagaggaagaaggagaaggagaaggggaaaatgaagatattatactgaaatatgcgggccctatgagacggaacatagcaacgtataatctaattatatcgacagatctggcagtgaatgacgataataacaacaatgatcagtacgaaatagtggccgattcattgccttccttgactcaacttaatgaatttataccgtcaatgaccaaaataattgatcgcatcttatccactaaacaaaacaaacaattacaagaattatttcctgcataaaacaaacaattgaacttacaagcttcgaaatgtctctttccctcaactcaataatcaataatagcatatacacatacacacataccagtatatatatatatatacccatctctattgactctcgacctcatcattctgttcttccatataatatctcagtcgacagattatagaatatatacggaatttgtacggattatatatcccgcctatatttctatttgtttgtcgcaaaaaaaaaaaaataaaaacaaaaaataaaaaacagcaacttagaattcaagtgaatcattcgattaatgcgaataagtaaatgaaaatattttgcacagagtaaaagagaacgtgtcagtagatagagaacgttgggtcgatacttcagacttcttacagtatagattgttgctttatcctctatttggtggtaagtattacattattactaataattttataatctgtgcttgtggatgccaagtggcctttaactacacgcttaaaataaaaaaacacaatctgagaagtgaatatatcgaggatatacattctaggtgtatcacataaacaagttatcttttctcttttttttcttttgtggattagtgttactaccgtcaatattctaatatacctatcacccctttgattgactagtaggcatatttctatatatatatacatatacatattgattgactaagttttcataaaataagggttctggtcaagaaataaaacattaataatttactatcaatgaaaagaacaccttctaatagaacaaataacactagcaccaatacctatggtggaaacaccactagttcctcatctactttttttgaatctttagacactacaagacagtataatgatcgtttagattatttaatgatcaatactattgggcacatagtcaaagttactgtttcctctggtgcacaatactctggtctactaatcgctgctaatttagaatcaaaggacggaatagaaataattttacataaccctgaaaaagtgggggatgctattgttatcaatggtaataatagtagtgatagagaagatgaaaattctattatccttcaacctgatgggaatcttttaattcatggctccgatgtgatggaaatagagttgaagaatattgattttacattaaatgataaatggagtgattctaaagttaatattagtggaagttcaacccctgttaatggaaataagaataatagtgactcaatttcgactaaaaataaatttttcaagacagatgccgatatttctggagctaacaagcctgttataaaagaaagagaattgcaaaaatgggttccagaaaatgttccactggactcaaattttattgatgctgttaaaagccaacatgaaacattagaggaaagttctggcccctgggatcaattctctgtcaatgaacaaaaatttggtgttaaatctacttatgatgaacatttttacactacaaagattaataaagatgatccaaactttgaacaaagattgaaagaggctgaaagattggcagaagaaattgaaagtcaaggtgtatcaggtaatattcacattgctgaagatagaggtatcattatcgatgactcagggatggatgaagaggacttatactctggtgtcgacagaagaggtgatgaattattagcatcattaaagaaaagtgctagcaataacatcaagaaaaatgctaatgatggtggcaaaaatggtgtaaatactactaagaaatatgttccaccaactttgagaaatcaaccccatcatactgatccagccattatttcgtcaactacatctaaaaatattactgctacaactgccaacactaccgccactgctgtcactgtaaacagtcataatacagcagattccacaactggtaaaacgacagtacaagatcaaaataagaacaatactgtagataaagaatcaaaagttgattcaaataaatccgaaaaagtggttccaaacaaagtttctacaggaaataaacccactaaacctggagtttcaagaaagccaagtttacaacaggattctgttatagctagaacattgcataatcatcataaatctgccagagattctcctaaacctagaattccattaccatccactaaagaagctcaaattgaagaattaaaaagattctctgaaaaattcaaagtcccttatgatgtaccaaaggatatgaaaaatgtcattaaacaacgcgaaaataaaacttcatcgaagaacacaaattcaaaaacttcgtcaaaggataataaccttggttctgaaatgaatggtaaaaataatgccatgcatcaaagaaggcgtcaccaaggtagtttttttggaagcaaaaaatcattaactggtaacaagaaggaattatttaacagaaatttcaacttcttccaaaagactaaggaatcgcatgatgaagagaaagagatggaaccattttttgttgaaaaaccatatttcactgcaccaacatggaatagtactgtagaagagtcctttaagaactattttcctgacgaagctacagctgttcaacaagcacaaattaaattgcaacaacgtcaattggcatttactaatagtatgagtgctgccggtatgatgagcattaataatagtatggccgccatgtatgcaggcatgacaccaaacatgagaataagtggtacaccaatgatgggattccacgctcaagcagggatgaatccgatgatgagtgggttctcaggaggtgccatgtatatcccattccatccacaaccagtattttatccatctatgagtaatccaatgatgcccatgatggccggtgggggtggtagtggtagtagtggtgggggaagcgaagatatgaggtctaatgcaccatctcaaaccgcatcaccacaaattcctcatatatatatgaatactgttacaccatttggatatcctgttaatgcacctccattccatgcaatgaacagtaatggtaatcacaatcacggcaaccattacaattaccacaacaacaatggccatcatgaacgtaacaataatcatcgttatcatgggcatcatggttcaagaaatattaatagaaatatgacgcacacgcagttaaatcagtaataagatagtttacaaaaaaataaccaaaaataatgatatctttctcaaccaactgttaacgtgtttttcaattgttttcttaacaagaaagataatttgtaatttagtctcaaatataaagtatacaatagtatatactctatgtgtatgtttatatcaaatactattacaatatttattagatatacattctttttattttgaatttaccttctcactctactagtttatctgtttgtatattccatagtttatattattagtgagatactgtataaaggatacagcatataaaacaatatacatatatactatccatagcatacgtccgtcacctaattatcaaaaacaatatccacattctccgaaatctaattcgctacagtttgatctgaattatttgagtttgtttttatatcggattcaaagttttaaattcgtttagatctctaaacgagaactaaaaaagaaaaaaacaacaataaaagctcagttgtatcttctctcgaagatactaactactacacacaacaacaacttctgcttaccatgtgaattcatcagataaaaaacgcctcagttgactgaaatgtgtcagttactagtaaccttttataaaagaatgaatatttgcgagaaaagaaaaaagtatatgcgttgatcaacttcccagaggaataattttaggtcaattggaaatctttctcttgacttcaaaagtccagcacagtctatcatttcagaataacaggtgatataatacgtaggtacaatatgtcaactgaaagtgatacctgttcagagcctttgttagcaaatgctaatatgataagcgaagatattttagaaagaggtcatgctcgtcggatgggtcatttagagaattattttgctttattacaaagacaagacctctatggtaatttcaccacatattgtgaatttgaatcatatgtggacactgaaacattggtgcctatcttaagagaaattttttttcaaaatccaatattagttcacacaattattcctaagaattatccgaaccatgaagagttctatttaagcgaacagtatttggaaaaaccttatccagaacacgactacattaaaattgtccctcatttaggtttgaacgacattataattaatgaacaagaagaatacagagacgttgtggattcgatcataaaaaggttcaacgatgacgcattccagattacttgttctttgactgaaatgatttccaacattagaattcctatatgtctacccaatagacctaattggagattattaatcttgtttgaccagaaaacccccaggagatttaagcatatcgtttatattagtaatcactgcagttcagatgcgatgagtggtataaatctatttaaagatattaacaaaggattagctgtgttgggaaaagaagctactaatattattattgacactatagataatgattatagtgttaataataacagtagatccttggagatatatgattatgataaggactatacaaaattcaaaagattagcaattcccatcactgagagaatagattacagacctaattggatagcaatgggtaaattaatggtaacctctatgataatgaaatatctggtgtataaatttaaggacagtgaaacgaaaaggatcaaagaggatcgtagagaaaatttccattacaatatcaatatcggatgggaccaagtacaacagttgaagactaatttacagagacataaaagttccatgactggatttttacaagcatgtttattcatagtcttgaatgaatcaggagtcttcaaggatagaagatggaatgaaatgggcgtggatataagtataccgaatgatcatagaaaatcgttgccaaaagaattagttgaggaacaatataaatacggggctaacgtcgcaggatcccattattcatttttaatttccagtataaaaagggaccaaatatgggaattgagccaatactataccgaagtgatacaaagtgcagattataatgttggtttgggcgcattaatgttggattttgtctacaagaatcagaatgtggataagataattacagattcctatttaggaaaccagcgtggtggtattatattaagtaatatcgggttacatactgataagagtggaaataataagattgaagatgatgaaaagaaaccatttgctggtggtattaaagacttaaaatttattcaaaatgttggcactttaggtttttcattggtagttaatgtgtgtagcacaaagaaatcaggtatgaatgtttgtgtaagtggtattgaaggtaccattggtgacagagagaaatttaacgctacattcaaagaattggaaaatttaataaggagttactgtgaatagataagccctttctttgtgtctgtgcctgtctctctctctatatatatatatatatatgtatgtatgtatgtatgtatatatttacgtgtaggtatttatgtgtactaaagattaatatgatgttcggatctatacagagcaagactgtccgagttgtatcgttaaaccgttaatgactttagattaaccatttttcccaattctcagcttcatatcccacgatagcataagctatactcttgatgcacaaaaaagaaataaatatattacaggatatctagcaagtacaaaataataataataataagcctgcctaagctacagaagaaaaagtttgtcttctgacagcacagagagactcgaagaagctgtaagagcttgttctctttctatattaatgagtgtagcaaggatcgtttaaatgtgtagtaacactttcaaaacaaaacaaaacaaaatagatgaaaggaaaagaaagtgatgaagaacgattccctattgttctcgtttgttaaacaaaggaaaactgttggccgtttaatttgctatttttgtcaataaataaataaataagtcgtttaaacaactccggcgaaaactatctgagaataaacaataaaaataagataaaaaaattaaaaaaaaaaggattaagaatgatcattaagtacggatgcatacctttttcttaatggaaatagagtggtatattttctaagtaaacataatcaaaaacatacaattgtttcgaatctataaacaagagttaggtttaaattgtttttctgaattcaattcgtaaaaaagaatcttgaaaatgtcgggtttgaagttcgatcttacttttctttttcttttttaacaagtaaaaaatataataatatagcaagaagtcagcaatatcaaagaagtgatacttcaacggatactgaaaaagaaactacttttcaacgaaagttttttgacgagtcataagttactgtgtttcttatcatataaattgaatttaacaacttgatcatccaaaaacttttttttctgtcaataatacacacatacacacacatgtgcacatatatggctgtttgcataaatgtttggtcaaattattgttgtcgaaaggacaattatcaatttgttcgatcttttttacaataaaagaagatattaaccatcataacttttattgaacgatggctcttgtattacacataattgtgttatgatcgaaagaaaaaaggcaagtggcatatatatgcaattttgttttttgtttttttttttttttgcacatagtttctttcatcctatgtagaaccacagaaaacctataaggggaatatatgtttattcgtgttctatgaataaatacatcgactgattgaaataaaacaagcagaaaagaacaaagataaggaaacagataatacatctatattaagtaagagcaattttgttctttacaagctgttgtttatctctgtcttggaatgtatttattattatcattattatttagaatctcttatctgtcttgttttcaaacgagtcatgattgtaatttccagatcaaaaagacaattgaaatttcaaaaaaaaaaaaaaaagacaaagaaaaaaaattaagtgtgtatttagggttctgcaattttgtcggggttaactgacaagaaaagagagaccgatactaccacaaagagggcaaacaaacagtggggaaaaaaatgcatcattctgttgcacaaccctaagaatacaaggcaaaagacgtttagcggaaacaaaaaaaaaataaaaagaaaacataagcctctaaagaaggaattccgagaaaaaaagaaaaaaaagtagaaaaaaattttcgatcttaaacgaaagaaatgtaatgagaaaaaaaagaaaaatgaaaaagaaatatatggttatttttatattatcgatatctttctaaagaccgttaacattgacgtaggtggatttgcgcatggcttattattatctatgacattttatatcgtgaataaacccttttaatatacacacacatatatatataaatatatgttctagagactttttcctatttgtaagcaattggagtttgttgacaacaatcaaacttatcaattgattactaattggttttaaaatttcatgttcttggctggattacagttcttccttctaccaattatatgtttcttctttttttttcatttttattacttcttaagtcacattgttgtataagcaataattcttgtcaattatacccagatcaactcaattgcaccagcaaaacaatagttaaccaaaaaataacaaaacttaatacataatagtaataataacaaaaaaaagaaaaggatgtctttaactgacgctgataataagatcacatatgacgccattgtcattggtgccggtgttattggcccatgtgtagctaccggtcttgcaagaaagggtaagaaagttttaattgtggaaagagaatggactcaaccagatagaattgtcggtgagttaatgcaaccgggtggggtccgtgctttaagatctcttggtatggttcaatccataaataacattgacgcccaaccagtcaccggttataccgttatgttcaacggtgaaaaagttgatatcccatatccatataagtctgacgtcgctccattagttaaaatcgatggtttggtccatgacggtaatgatcaagtagtagacgatgaatacatcaaaagaaaggactttgaagatgacgaaagagaaagaggtgtcgcctttgttcacggtagatttttgaataacttaagagaaatcgttaagaaagaaccaaatgtgacttgtttacaaggggactgtatcgagatcttgaaaagtggcaataatgaagtcatcggtgctaaagtggatgttccaaacagaggtgttgtcgacttcaaagctcatattacttttatctgtgatggtatcttctctcattttagaaaagaactacatcctgaacatgttccaaccgtgaactcctcctttgttggtatggctttgtatgacactaaattaccaacagaccaccatggtcatgtcatcctaggtgataaccatatgcctattattgtctaccaaatctctccaaacgaaactagaattttatgtgcatacaactctgctaaagtaactaaggatatcaaatcttggatgcttaaagatgttaaaccatatttaccaaaggaaatctctaaagccttcgattctgctttggagaccggtaagttccgtgttatgccaaactcttacttgccagcaagacagaacgacgttattgggttatgtgtcgttggtgatgcattaaatatgagacacccattgactggtggtggtatgactgttggtttaaatgatgttgtattattgttacgtaagatcggtgacttagatttcagtgatcgtgctactgtattagacgaattgttagatttccattacgacaagaagagctacaacacagtcattaacgtgttatctgttgcattatattctttgtttgctgctgactcagataacttgagagctttacaaaagggttgtttcaaatatttccaacgtggtggagattgcattaacatcccaattcaatttctgtctggtttattaccaagtcccttccaattaactaaggtgtttttcgccgttgctatttactctatctacctaagaatcgaagaacgtggtttccttggattcccaatggctttaatagaaggtttcatgatcttattaactgctattaaagtttttactccattctttttaggtgagttcatgggttaatcaaactaaggaaagaggaaaaaaagaaagaaagaaaccctcatacactctttttttcttctctatttatgttattttttctttgttttattcaattgtctctttccttaattgttttactgatcttaatgtgctgtattgtggcttcgtttcgcttatgtactcaatgtattttacgtttgattgttattcatttatttatcgttatttatgtaccttataaactttatatcaatataattgtcaattaaattgtaattctttaagtggtcattctagtaaatccatcatctttttctttaagaaatgtatatcggtgaaaccatcaccaaaaccaaaactcttacagcaaaaacaaaacaaaaaaaaaataaaaagaaaaagaaaaaggaagggggggataaagatcagcgattaatgataattcaacaaatcttaataatgggataggttttattttatgcaagatgaaggaatgtattctgtgaagagaagaggggcaacatataactgtatattaaggatagcgtgagtactgcaagtgtaaaagtattttatttttttatgatagatacccaaacatacacacacacatatatatttatatatctatgatggaaagatcattgttttggcgttgggttagagtttatatagtaggtggttcaattgttgggtcaggtctcttattatataaatatagtcgtccaacagatgaagaattaattagtaaattctcacctgaggtaagaagagaatacgaagcaaacaagaaattgagagaagaagaacaaagggaattaattaaaatagttcaggagagtgcaaacagtaaagaccccatatggaagactggtccattacaatctccgttcgaaagaggtaatctgggttcatattcaaataatacggtcttggagagagctaaaagacagcagctggaaaaacgtgaacaagaagaaatagataaagttagacaaaatatagaagctttaaaagagcagcaaagacaggagaaggaaactaaaaaagcaaataaatcatggtggaagttttggtagaatatagcaaataaggtgtaacttttgaagtgtgggaactgtgagatgagcattttaaataggcatagacacaaacacaagcacatgtttatataatatttattattcttaatagtgtgattattttatttattcttaactgtttatttattcatctacttatttaagtactgatttttttttttgctttatttaagagtagagagttagttttattgtagcattaggattcattcacagatacatgtatatatattctgcagacatcttcaagcagagttgtattcctttactcagaataaagtagtttacgcgtcccaacgcgaaaactgtttaattttttctcgaagacataaagagaattttataaactgaagaagtaaactgataggaatagaaaacagtaataagagatggatatatatatatatatatatatatatatgtacgtatatatgcatgtaagtatattcttttttttgtaactcttctgccatattagatttaaattttttcttttccatttctactttcaatctttcatttcccgttcattgaagttactaatataagtcatccgaataatcgttaaatattgcataaaattacacacccatataagtaaatcaaagtatatatacaatcatgactgacgctaagcaaattaagaacaaccacacattaaagattcagttacgttccaaggatgccactgttccaacgaaggggtctgctgctgccgcaggttatgacatttatgcctctcaaccatgtgtgattccagccatgggtcaaggattagtctccacagatatatctttcactgttcctgtaggtacatatggtagaatagcaccacgttctggtctagcagtgaagcatggtattcaagctggtgcaggtgttatcgatagggattacactggagaaatcagaatcgttcttttcaatcattctaagaaagatttcgaagtatgcaaaggtgaccgtgtcgcacaattgattttggaaaagattgtggatgatgcagaggttgtggttgttgattccttagaacaaagtgaaagaggtgaaggtggcttcggtagtactggtaaataaattagatattcctttatgtattttaaaatactttaataataatgtactatagtaaaaccatttacacctatttgtataattttgattcaagaattgcatgataatagaaaaaatattctcatatagaaaaacaaagaaatgtatatagcagcatattgaatttgtacacacggtgaaagatgttttaattccttctttttctatgttgattttacaagatatgttaaaaaatattctccaacctacacaaacatatacaaatataatatatcacagataaaatggcctctccccctaatataatatggtatttgttctctacaggcaagcaagtatctacgctgaatcaatctatgtcttgtgtcttttatatattgtagctttctcaataccaatgagggtaatttttatttaatcgctttttttttttgtttgcaatcttctaaaaaaacaaaaaaagaaaaaataatgaatgataaagactgatgttgttttgacagtagcactattttattatgatataagaatattgagaagaaaatgtacatacatacatagagataaatataaggtatattggtgactctctcttataacacatggaacactcattaaatgtggctggtaacactgtgaggaaacatgtttatcctttgaaaatggaaattctgcccttgaatgattcaatacatggatcaaaagataataatgttgtccaatcaacagtgcaagatttaccaaaggaaagtgaaatagatatttctccgaatagaattatcaccacgatcacacagaaggatttacaaacaaaaactagcaagaaaagagagcatggtgatttggaatataataataatagtaatactgaagaaaatgatgaaagttttagatttaaaagacataaaaataggtctggtgttcctactttaggcgagagactagatttattacagcaaaatattcctccaaagagaatggaaaattttgattcatcttttccggtacaaccatcatctcaaaataacaatcacaatctcaacaataatcataacagagacgataatcataacagggtttataataaattatccaaaaatgaaaattctggatttgattctattcagtcgccaacttcttcttcacttggtaggagtaacaatcaaagtaaattaaatgtcccaacattattaccactaaatcaaaatttagaatattcaaatcaaatgtatccaatgtattatgtacctgtgccgacatctccaataaatccgcagtattatgcgtctgattacaatgcaaattctaataataaacctaatgatcccaatagaaatattcggtcgattccagcgataccaaatgcattttttcagtatccaccaagctcacaacctgttgtacaaccatttcctcaatttgttcccataccgacaaatattaatgatttgggtaaacagcctacttctaataaatatacattgtccagtaatcgtagtagaaggttgtccattgtatccaatcgagaaaatagtatgattatgcctcatcctgatatatctactaaagaatattataggcatttgacaaatacaaatgcatccaataagttaaagcaattattcacctggtgtgcaattaagacctatcaagattttaaagaaagaaattctacttttttaaataaacattcttactatggtataactgatcctactcgtacagtttctacatatttagataccaagagaatgacattaagtattattaacgacttcataaatgacttacagcatggttcattggatattgattggagtcctccatctaattcaaaaaatactacaaataaacagggaaaggaaaccatagtaagattaaataatagtaatggagataatatagatttagacttgaatgaggatcctattctagaggaattatttgatgatgaagataatataagtgaaattagtaaaaatgacccagataatgttacatattattatgatgggctcaatatgaagaaatttaagaaaaacaaggataaacaattagataataaatcaagtaagatcaaaaagggtcccaatatgcaacctaggaataaattattacagaaattgttaccaaatccgaagaatgccgaaaacgagaaaaatctggagcttttaaatacaaggatcggtaagttgaaagatgaaattgatgagtggaaaaaagttattgatgaaaagcatccagattctgaatggaattcggtcataaaattaagtggacaagagcatgatactagtagtataaaagaaaatatggatcctgaattaattagcaatattgaaaaattagataaaagcgcctcgaacattagattagagttatctgaaagagtcgataaattgcaagcacattcacatttatacaagtcttattctcagttgttaacacaatcactggcacatagaatagatttttttgtgacagaattcaaacacaatcaaaagaaaaaaactataaaatcaaaaaacgtgaaagattttcttttggatttatctcgagctaaaacaaagtataataatgataataatgataaaatttaaagaggcatgcattgctagaatcagttcagcaagaaaatcgtaattctatcaggaaggtgtgagtttgtttttacactaactgttgtcataaaattttatattcatttttataaatgaaacatgttaaatgtaatatgtattccatattgaggtataaatatatatatatagatatatatttagttgtaataataataagaaattgtatcttactctaataacaaaatttaatttacaatataagcgtctgggtattcttatgatattattcagacttttacaatattatattatttgttttattaattgcaaaatttagaataaaggttacgcatgctatgtataaaagagattctttataagtgattgagtttgacaagtagaaagcatttatttattacagttttcgttcactctatcacttttacagtaattgcatgctagatttaaagtattttatgatttagttacgttgatataaatagatgtactcatttatactaaaataagtaatgtccaaaaaaactactagctagaaaataaaattttttgatggcatactgtgcaattagcaaattgaattcaagttttttaatgtaacttatattaattaaagagtaaatactagaaaagtttttgagattaataaaatatattaatacttgcactatttttgctatgtaaattctcacatttcttgtgctaggtaaataaaaaaaaaagagagagaatgcacaatccaagtaatttttatttatttagatattgattttttgggcatataataaggtagtattgacagagagtcgtttatagaattcaatacattaaatagaaacaataatttatttatacaatataccttttttttttgcatgtttggtataaaggtatatctgttatttactgtaatatccctgatattactgtttaggggttgtttagaaaaatgagggttgacgatacttttctgaactttcctttttgcaaaattttacaaacatagataaaagcaggagtaaccaatataagtacaagagagcaactaagaagaacaacaacgttatcttagattagggatatagatatatagatatataggaatattacatctagagatatagaaggagtctatatcctatatctatccaagtgaaataattattgagatttgaacgagaactactgttatcagaagcacataacctcagcgttattacatttacaataatgaaaaagaaaacggggcgagctgggaattgaacccagggcctctcgcatactcgaagtcacaacaacccaaagtgagaatcataccactagaccacacgcccttgtaattggtatccttgtcgtagaatataacagttattaccatcaagattacgtaagatcctgaatgaatctagaactatttattgtcttaataagccatacacatgctacaacattagatgctacataatagagagattagattacataagattttggcaaatctagaatttacctattgtttttgttggaaaatgagagtttattactgtcatttccataagaattattttttaattagcttttctgtatgctatgtggtgggcagatgtaccacaatattggaaagacattttatttttcaccaaatatgtttttcggagatttgaagagaaatgaaaaacttaaaagaagagtcaaagtaaatataagaatgcatactgtatacactatataataagtatatacatgtatttaatacaaaacacaacaagcatctataacttaatgatgtctaccattattatggacgctaagggctccaaattctaatagaattttataaaataagctgaataaagtttcatgattaaataaataaaatggataataataaatatatggaaggttgtcatatatagggaattacagcagttattgtttgttacctatctcatacaatgaaaaaaaacatacaattatagattgtatatacgtaaaattttgagctataaaataatggtccattatttataaaattgtggattaaaaatattcttgattagattttgtaatgattaccaattgcttttataattttctttttttaataaatgcattcagacatttatacttactaacagtctaatgatggcaaatattttaagtgtataaatgtcttagtactatatttaattgataaactctttacatcattcactaaagtatttcaataagtatttttcgttgaattctaaattggaatagtcatacaagaacaattgattatctaattacataaaatccagaaccaattttacactcaaccacaatgttacagttagtttacattattcctacaaaatgaatggttaggatagagggtagaataagatattatatttattggaagataaatactatactcactaatttttctttataaagactgtttttagtggaatgttaccatttttttaattcataaaaatataattttcctgaaaattattttaaaatttaaaaaaactggataattgacttgttaaaatctaaaacatgataaatatagatatggatttcaattctttctagaaaattatttgtttataacagtttttataaatttggtaagatttttttttttgtaaaaaaaagtgtcaatatgcaacaacacgtgaaaaaaactttttcaaattttcagaattatcccttactttaaaacaacattgtgcggagaatgagcgcctgtagtcattggatatataataaacattctcaacataatattaaacagatttagtacaccagtagatacgcaattccgagggtaacacctgggtatttgggtggaggattggtacagccatgtgcgcagtggcttgtataaggtattaaatctgattggaggatttccagggagcgataattatatcagatcttgtcaagaggcctttgattattgagagataggctagggataatcatcttatttaaatacatcttagtaatgacattaagaagtaactcttaatatcatacaagaaaaagaaaacaacaagaagaagtaatagtacaacatcagggttattaaatagtaatatatagagcttacgtaagggtgtttatacttatactaattgatatgattcatccatttacatacaacaactcttacattacaataaagttcttcacgctctttctctatatacaatatagaaataataatatacaaagattgtaaataagataaaaataatgtatgatgaaatccttggctttatatatgttaacattaagctattttcctctacgaacagtaagatatttaataaacaaacttaacaacttttggtgatctcaacgattattactcaacaatttatcgtttaatatctactaaaatcttattgttctatctatttcattatagattatgcaatttattaataatccaatatcaaaagttctttttttattatttgctcttccttccacaagtctcattgtctaatttttttttctagaataattaatcatcaggtatatttatttactcagattgtgttgaaatataatcaaatgtatctttgataatctaaatttatcataatatattggaaatattataaacgtttatctcaaagaaaactttaatataaaatgtttcacactgtatattgttatatattatatagtgattatgtagaatataaaaaaaaacagacaacagaagttagactgatagtaccacaaatatcttgttataagtctatatagtttcattgtatttataatgaattttaataaactttttgatactgagatcttacttcaacagataatcgtaataaataatgtagagtgacattttgactccaacactaataatagccacattattgtaacacataatataaaagaataagaccttcttataaaatagataaaaaacataaaataaagataaatttagtctcattttagacaatattttattttaaaccaattttttcttacttcaatcaattatacaagattaattgaatccagtgtaagaaatatctctttttgaataactacgtgatattttgtgaataactgttaattcaatgattcataattattctttccacctgtatatttaaaagaaagacttggacatgaattgagaaagtaaacacagagcattgtttttactactgagttgattttattttatatatgtataaataccaaaagttactaattatactaaattttaaatacgctactcatcacagaacatgaaaaaaaaacattaataccaagttgatatattttattctgttatataaataaatatatacaaatattctcagataatcattcttctgatatgactgaacttactaatctaaaaaatttccacaaaatcaacacatacttttgttcacatgtgtatttgataaaaaatattatagatagtaatttataaaattttattaagttgtaaaaacctttttttcttcctccacttagttgattatagataaaatattaataatcaagaatgtttattttacacagctgctatggaattaatagaaaagagtattacaataaaaaaatcatatacttttactattcaattttttgttattaaatgacaattaaatacaatactgtaggatttagtaattcctgatagtgttgaattactgttactaatgctaaatatatccttaatataataacactatcctgtttattttatttagaaagaatataatggtatattcttattacttacaaaaacacatagaaaatcaattaaccttgttataaataagatatagaataaaatatcagcccggtaacaatatatacaaatcggaaagactttaacatgatacataatgtcacaacccatcagcaatatacaatagtcagcagcctctttattcattctttactaatattcaagctccattgcttagtaagcagaccaaaaacccaaatgaacagaagttgtaaaaaaataagaaaaattttaaaaagaaaagaaagaaagaaaaaaaaattccgatgacctcgaaataaaaataagataaaataaaaaacctgttcagtaagcaccaagttacagtgatctctcaaaaataaaattgactctgtaacgatattcaagaatacccagttaaagaacgtttaaatcaaccacagagataaaaagtatttaaaactctatatcacatcatttacattttttcccttttcctttatcgattttttttatcatcatagcagtttgaattcacagccatatttacagaggatcattttactagaactgttcttataatcgtcattgattttcaatatattggattattaaaaatttcaaatataatatatattccattattacataatgtccgcagacggatctaataatataactattccagttgaacacgaggttgagcctcaagaagaattcataaataacgatgaagtagcagaagttgtcccaactaatgatgatgaagaccaaccgattgacgaggaggaagatgaagaagaagcaaatatggatgttggcaatgacgttcccatggaacaagaaactttagaaatcgatatgtccaacaattcgataacctattttgataaacatacagattcagtatttactttagctcatcatccaactttaccattagttgtatctggtggaggtgacaatgtggctcatttatggacttctcattcgcaaccaccaaaatttgcaggatctgttaatggacacacggaatctgttattgcttgttcatttactgctgatggcaaatttttagtgaccgccgacatgacaggtaaagttatagttgaaataggtgtaaagggtggttcacagtggaaaaagacatctgaattaaatgaagtagaagaagttgtctggttaaaatgtcatccaactataaataacattttcgccttcggagctactgatgggtctgtctggtgctatcaaattaatccagatggtactttggaacaattaatgagtgggtttattcatcaacaagactgtactaatggtgatttcatcaatattgatcaaggtgaaaatgcattggaattagttacttgttctgttgatggtactgtcattggatggaactgttatactgcccaaccaacttttaagatcacacaagccgaaattaaaggattattagctccatgggtttctattgcagtggctccatcaacattaaccaatggtaatgctggtatcgttgcccttgggtctaataatggtatagtagcaatcataaatgctaataataatggtgctgttttacatttagagactgtagtacaattgaaggaggaccaagaagaattggatgcatccattgaatctattagttgggcccataacttcccacttatggccattggtttagtctgtggtgatattatattatatgaaactaatacatggagagttaggcgtaaattcactttggaagattctgttactaaattagtatttaacggtgatgacatttttgcatcttgtattaatggtaaagtttatcaattcaattcaaaaacaggtcaggagaaatttgtttgtaccggtcataatatgggtgtgctagactttgtaatagtgaatccaaaagaccaaactcaattaaggaaagttattactgctggtgatgaaggtgtttcgttgatatttgaagtaccaaattaaactcacaaattgtagaaaatacaatcaaataataataataacagtaaataaatagatacaagataaactagacatttgatataacatttactattactaaaattttgtataatagaaatatctcatattatttataaactatatatctaaaatagaattatttcgtatcataagtatgttaactaatctatctcatgtatataatatacacacatggtaacagtcaattgatagatgttgtaagaaaattctaatagaaggctttttatatatactgtatctatatttatgtgtatatgtacagcttattctaaagaatctaaaagctttaattcagtttgaataagcttaattacatcttttcttttactcttgagaattttttttctttctggctctagatcaacaaggtcaataccatccaattcaattaataattttaataacatttcgttgcaataatttctttcataaatatctttttcaatatttttattgaatgattttagtaacttttgaattcttggtttgaactcgttttcatatctcaattctacgttctcgatttgtgactctaacgtcaatggaacaacagatttcttcttttgtatatcttttgctgattttgtattatttgctactgtagattgtttaattggattctttgcaaaaacaccccaaataaagtaggctatacaaatcgcgaatgtcccagttgcgaccatagcaattaattgagagtctttgttatcagaacttataaacgacataatgcacgactttattaatatttttgtttctatctgtccagattagtattaaatagtatttttatatattggtgcgtatttctgcaattgataactgaatcaatactgatactacccacaggagtaaaaatgaaacgctctaaccgttattactcctcttcctcttttcttttacctcccaacaaacaattgtgaggatattattgataaaataaatttctctttttctgatcatcatattgatataaacatgcttactataaatcgtatattgttgacacatgatttaaccaagctttttagatcatctgtatccattcattaagtttcttatctaactttgtttggtttttgaataattaattttcaactttcccagaagagtgaaattttaaattttcataaaagaggggagtctttcagaagaagatagaagaacatgatttactgagtaccactgaagtgaaaaataccatctgctaatatacacaaattattgttgttgatattctatagatattatatgtagcaagaaacaagatccatagaaacttttctgattattatagagtgattcatatattctatcacagtatttcccctcccttatttttttggtaaaagctattatcgattaataatattcatattgctactattggctccttctacttctctattatactttaaatcatgagtacacaagtcacagaaccttatttaccatcgataacctctctttctagtgaaaatcaattattgaatgttagatatattgtcgaaccagattttgattttattaatagcctactaaatgatttatcaatagttccacctttaatacagcagaaaagattagatacactatattctttaatgaatattaacgacatgttaagggaagagattagtcatgattacttaaggacagttcgttacctatattctcatatatctttaaatgagactttgataaaaaatgatttaatcacaaatataaaattttttaaactcataaatttgtgtgttaataaatgcccttatctactgtatccgcatttgatacaatttaaagaatatttattttatttaattgatagtttcaaactatttatgaatgaaaacgatatttcaataaacagtaatgatagaatgtcatgtaatattattatatgtgatttgttatttacttttcttcttcacattagcaatactgattggaaatttgattgtacttttaatacatatctagaagatttaatatttcaaataattaataaatatatccatggtatgaatttcaaatattccttaaaagtcaggctttccaaaaatgagtcttataactcatacaattcattattaatttcctctaaagataacgaaactattaattatcaaatttcacaacaacaatcagaaaatacttcatattctgttgcctatgattgtttatctaataaaggactccttttatctaacttaatccctaatccagttaaaatatctagcgttattgaatgtactatcctgtcaagatgtttagtactgtacacagaaattaattcatctatttcaataatcaatagtagtagtaataataataacatagatatcaacagcaaaataattaatccttcaactttacaactttggcaaaatccgcatgtcatgctgtttgtttcaagtttattaaaatatcctaacatcgaattaaaattatctgctttgaaattcctgcttttcccatttctacatgttaaacatagtagtttaaataaaaacaatacaaataatctaagaaatattacaaaatatttgccctatttatttcaatctttagactatggatatataccattttggtttgatcctttcgactatatcatagatttaatagttttattcaatgaaaagaacccaacaaataatccaatcttagtgtatattgatgaatcaaatttatacaagacattccttgatgtatttaccagttgtatagaattatcatcgaaaaatcaatatattttagagacattaattaaaatggtacacatttgggcatcactctcttcatttgaagaacggacgagatgtgctgtggttaatattccaaatatattaacgaggttaaagggtgatgttgaatcacatataaatctattaaatgaatttattgaatattatcaatctgtcaacaaaaataaattacataccaaaagaaaatttccacctctacacgatagtaaactagtcctagcttggttacatttattaaaatcattttctcgtagtattactatactaaggactaaattacaaaaagtttaccttaccgaaacactagccaaaatgctaaatgttttatatagattaacacatatgacatatgatgttggcaacagttttttgaagattgagttggagataatggaattaaccttgggtaatatttgcaattttatagtggagttctctagtttgcaagtttctgttttacagactgacataataggaactattaaagaaattttaactgatagtttatttaatcctaactcagagacaaattttaataaagaaagggcagatgctttcaaagatttaaagttacaagatattaaggcttattcattatgggtattacggcatttaatgtataattgtccaaattcggagaagatgaaattacttcagaggatcccactggatattatcttagattttattaatgatccaaattggtctgttcaagaacaatgctgtcaactgctaagaaatttgacttgtaattcaagaagagttgtcaatgtattacttgagaaatttaaatatgtggaatttaaaattgattcaaaaactggattaaacaagaaagtcggttctacttatttatttgagtatttagcaagaaagatgcgactgttagacatgagggacaaatgtcaaagaaaaacattggaagcaattctctacattattaataatattgcagcagttaatgaagataaaaaaagattggtagtggaacagaatgatatattagagattttgaaggccattttatctgaatcatcgcaaaactcattaaaatacggtaatgatagtgacttaaaattggctagtctttgggttctaaataatctattgtggaattcgtctctttcaacatatacacaatatgtgttagaaggttacactgctacagcagaaaataatattaacaagagtacttcttctgtgaatgcgaataataatactagtagtataaatgatactcaagacagtagtagcagtagtagaagtagtagaagtagcaatgaggtgaatacttatggtagcaataatgagtcaaaaccgtataatcttttaacaggagaagatagacatactatcgctggagaagaagaagaagaaacggagaatgatgataacgataaagcaagtgacgaatttattcatccatttaggagtgcaaccgatgacattaatacaaaatctgtacatgcaggtgattatacagttgaaagatgtaaaaagttagaagctattggtttgtatgcccttattaaacaaaacatatttgatgattctttagatgtcagagaaaaagcaagaacactattgtatcatatggacttattgcttaaaaaggtatgaaattttcaggaaatatataattgaagaataatttagtattgaatacgcattataatatgcactaaaatttagatgatttcaccatctcatgtgaatttgatgagttacaacaagagagaaaacaatgaacttttagaaaaagtcctacctctgcacgatatctattcactcataatgaaatattcaaaacatacagatcatttaggaaccgttcatgattaattaagatgacacatatatagatatataatattttagattaaaaaaccatataaatatacaaaagaagggggtttttgtctgttaacatatatgtaataaagattagagataaattgattgaaaataactgaattaaaaacaatagattaagtctaatcttgagtcttttgagaaccacgtaataaaccggttcttctggcggcaattaaaccagccttttgaccagaaacggcacctctagaaatagtagaagccttaccaatgtgttgatggttaccaccaccatgtgggtgatcaactgggttcatggcaacaccacgagtctttggccaagagtttctcttaactctgaacttgtggaaagcacgaccagcctttaataacggcttgtcaactctaccaccaccagcaacaacaccgatgacaccacgggcgtcagatgagataactttcttggcaccagatggtaatctaactctggttttgttttcgtctgggttatgaccaataacaataacgtagttaccagaggctctggctaaagcacctctgtcacctggtctttcttcgacgttagaaacaatagtaccttctggaacagaacctaaaggtagaatattaccgacagctaaagaagctttcttaccggcgtagatgaattgaccagtgtggacaccttcattggcaatgaaagtttcctcacgtaacttgtacttgtatgggtcacggaagacaactttagctaatggggcacctctaccagcatcgtggatgatggatttaacaacaccacgaatgtaaccgtgacgttcagcgtagtctaaagttcttaatttagcagcaccttgtcttaatctggtgtgagaggtgaagacggaaccagcaccctttctttggttacgaataactctacctgcacaaaaaaagtgtgtatatatatttatatccaaaacatgttcgagaaagatatattattgatataaagtaactttctgttagtaatcaattccttttaatattctagaagcaacaataaacaggtgaatttaaatatgatctgcatataaaaggggaatcaattatcttttaaaaataactcaatgtagaccaagtagaaatactatttaccaatatcgaataacgattgaagagaagtatctaaaactttagcagatattacttaacaaaacacattcttactacatcgtataaaatattaatacaatcaatctgtttacattaaaaaattattaaatgatccgcagtctttattccgtatacaatttaaattcatatatagttttttttttgctgatttgtatattaaagtctaataaaatcatcagtacaagtgtattttcgcttctatttccttcttctactttattattaattaaaaaattgaacacagtttattgttgtatatcttccaatgctcttccacaccctgtcacatacccattgttaatcaattatctggtttttttaacggctggtaacttaaaatgagcatccagaacacccattaaataattgcgctacaagcaaactctagtcaccttgtattacaatgctactatacgtataagatcttagcgtttacagttacacattaagcaatacaatagacagtttacaataattgacatcgccttgatgcgttgctaccgtaagagagaataatttccttgattatgcaggtgagggatgggtctattctctctctatctcactctgaataagtttacagtatacctaacgatgtttagacactactctgccacacatacacacacatacacgttgatagatgaacagaatacggaattaatccaagcaatattgtttagcgtgtttagtttacaacccagattctgtaattgtgtagaagggagagatagagaaattgtcgtgtgttggaaaattgcaggatcttgttctttggtggagaaaggagggagggagagagccaattgctagttgacaggctttgtctaacactgttcttccccgcctgctccccctcaatcgtttctgtagaatggacctctcaccatctcttgctctccacatgttatttccttccttctgagacatctctagataaacaagaatgctccctccactcttgctctttcgttctagtctccacctctgttttctgtgttctctgggtcttacttgggaaatcatgtggctcagaataattgatcacagtttgagaagaacactaggacggacataatccattttatccttgagcatcgcgaagttacgtgatggtacgtaaatattttcaaacatatacaattctaatgtactggtttctgttttaggtaattatatcatttgaagagaaacaaatacgaaatataaaacaacagaaaaacaaaaacaaaaaaaagataagatcaataaaaacagtcccaaagcagtggaaaaaataaaaaaatataataacagcaaatatagtggattgaagagagcatgtgtcgtgtcttgtctactaaaattaaccttactcagctcaattgctacacttaatctttctttgttatgctctacttctctttatgaaaagcaataaaatgaaacgggtgtaacaactttgagcacactctttttatctatgttctcatctattaagcatatcttgctttcttttccactgtatcagctgacaccctttagatatttgcaaaatcatcctttaacttggatttttgcattcttaaaaattgaaaatctattatattcttgtattatgtggtgtacagatcctatgactcttatgattaaaattcgacatacacctacaaacaaaaatatgtgcaaaaaaaaataaaggcccagtgaaatagactacattagctttttacgagttaacttgttgaatgatttatttttgaataagactaaaattgttttaattccagcatctaacataaaaaaatgacaagatttattggttgtatagatttgcacaatggtgaagtaaaacaaattgtgggtgggactttaagcgatagtaataacaattctaatttaaagactaactttgtctcctcaaaaccttcgtcgtattatgcaaagttgtataaaaaatataatgtcacaggtgctcacgttataaaattaggacctaataatgatgatgctgcaaaggaagcgttgttggctgcaccacattttttacaagttggtggaggtattaacgataccaattgtctatattggttgaagatggcctctaaagtcattataacaagttggctattcaataaagacggtgactttttgcttgacagattgattaagataagtgaattatgtggtaaagatcgtcttgttgtcgatttaagttgcaaaaagacttctgatggaaagtggatagtagcaatgaataaatggcaaacgttaactacactagagttaaaccaagatacatttattagattaagtaagtacaccaatgaatttttaattcatgcagccgatgtggaaggtctatgcaatggtattgacgaacagttagtctgtaaattagctgaatggactgaggaactaggcgatgagattaaaattatatatgcaggtggtgctaaaagcatagatgatttggcattagttgatacattaagcaaaggtaaagtagatttaacatatggtagctctttggatatctttggtggaagtttggtgaaatttgaagattgttgtgagtggaataatcatcactaaaacatttaagtttttaacatttatactatttcttatccttctattatcacctaaagtactcttttgaaaaataaatatatctatatatgcagggtatgtatcaattacaagagaaatggattggattttatgacttgtatagtagttaaaattactgattttacttttttttttaaaaaaaaaaataattccctcttacattaatatatcacaagcagaacgtataaagggtttgaaataagtcctttttcttaatgtgagttcttgtctttttgtaattatgtcattattacaaatgagtacatatatacatatatatgcatgtatatgtttgtttgcccgtatgcttataggtatatctatgtattattgtgttttaatgacatttaccaagcatcgtcatagataccaccggcgcctggagcatttccacttacagcattagagtatgaactaccgttcatatcacccatgttaaaatcatgatcttgcatgcctgaattcatcccctgtatattaccaacagcattaaccttttcatgttccatttgtgtcaaagctaacaaaatagatgcaacttttttctgtaaagtgtcaattcctcttgtaactacttgatctactggaatagaaccaatagtctctacatttatataaaaggtatctgccttagctttataatcgaataattcaccttctaccggaggatcttcgtattcacaatttttagaatgtggccattcttttgctggatccgcttcataccaatagtgagtatgcttcaatttattccaaggatcatattcaaattcaatggctgctgtgggaccccatttggcatgttccttggcaatcccctttttggctatgcaagtcagtttcaattcttgaccttttcttaatttacaaattaacacaccattgccctctttatcttgtatgattggatgaccaatattacgtcctaataaattggaaacaatagtcaaatctttagcatatacattcgtcgtactttcactttcaccaacagcttgtaaagttagtactaccgaacatttatcgcagtggtcctcacagaaacaatcacgactgtattccatttgttcaatatctatactttgtagaggtatcaacccaagtctatgtgcaataaactcgtctgccaatacacttgaattaatttcaatttcaacagaatctatggctaaggttggaatttcagcaatcataacacgacgcaatgaattagctagtgccaaatcaacatttgataaaatgaaatccacattttctttagtggcttctcttattttaacttgaggtccttcttcgctcattttttatatctttattatttatttatttattttttaatttatgttgtattggatcctatacaaaaacctattatcaaatcataaaatattggaaagttgatgaatgtaattgtcctaatatacccactatagtattaactttcgctagaatcccaatcttttcttgttctctggagatattgagtctgcactttctttttaacgctttacttcctcttttctttccttttgtaaaatttatcatatctttattttaaaggaaatcgaaatcaacaaactaaaaaaaaagagagaactattggggtcacgtgagcatatactccatctttttacatccatacaccacgtatgttaaataataatgtttcatttttgatagtgccgtaagccaaacggtgtcgacaaagaacaaagacaaagcagaataaaacataacagataagtagtatcattatacaaattcaatcgcacacacacacacacacacacacacatacatatatatatatgtatacacttatctgtctatgattaagccaaaaaagataatgtgacattgtaccgcccctttacaagttttctctctctctctttactattatgtttctatatttgtgtatgcaccctttgttcgtcaattttaaccgtgattataaatattacattgacataactaaacagtaactgatatctacaggaattataattaatatattatgatcatcgttattattactattaatgcaaatgatattctacaaggaattcttcactatattcatataaaatattttaaatataagttccctgtattacttccaatttattaatatgtttgtttgttcgttttctttgtgtgtctatttatattttgtgttcatgtgaattgtctagaaccaccacgtacaaattctagaatcttccaaccttccgtttcttcatcatcgatatgttctggatctctggtaaaaaccatagcgtaggaactcattagaatattgtcttcactaccagcagcgatttcaccagtcttaatatttttgtagacgttgatctcctgagctctacaacccactactaatacaggaatatcttgtggttgtaataatttggcactaacgatttccacacctctaatatctaagatacgaccttctgaaaagatagccttttccttaaacattttctgttgggcagcatagacattgaatggagcttcactaaaccatttcttcaatacctcttcatcccctctaacataagcctctaagacttctggcacgatgtattctcttaagtgctttgtgaaagaggcactattgaaagtcggatccattaatttaaattggtaataaactctaccagattcagtctctgcaaagaatttaccaatcttattggtaatttttctcaagaatatgataaatggattttcactttcatcccaaagtctaactttaagattgtgtaaagatctaccaacaactgtcttttctttaaaatcttccatttttttaccaatggattctttagcttcaatgtttgtagctactaatgcagttccggcttcatcattggacttaacagctcttactctttgcccagtagccaaagctttagctctcttctctcttctttcttcttttgttataaacccaccataactggaacttgaaccatcatcaataacctcagagacgtctttgtatattttggtttgtctaacaggctctaaagtttcatcaatcttttgagctgtcttgacagcagcctttctggtagtcttaccaatctctgaatcccaagctttaatagccatatcttccatagcttccccagttttcttcaaagtcttaccaacaatagtagaccctttttgagccttcaaatacgcttcacgcgccttcttatatgcttcagattcaccaagacgaccagatgcatcttgtaaagctttaatgttatcctgcaactcagctgatttttgccattcctttttgaaggtttcacggaagatgcttaatggggacctcggatcatttgcatttgtgtcttctctttgattatgtttatttgtattttgttcatataataatcttgaagtgtgtaacttagaagataactggagtaagccgatagtggtttggttgttataagagtataataagttcaccacttgacgggaccctattgtaacagtttttctactggttatcattattagaaaaatcgaagagcgtggaaggcagggacagtgatagattatattttgtgaaagattatttttttttcactcttcttttcaaaggatgcttcttgttctcttgaaaagtgataaaaatttattttactgtctagtgtacaaggggatacttgtgggcacattaaatgacagaattgatgcagaaatctgaaaggtaaagagggagtaatatctttcactatagtttcgtttttctcttgttcttccatcactatcaccaaaaaaaaaaaatcaacgacaacgataagggcaacagaaaacaaaggcgggaaccaaagttctctctccaacgttcagtagacaaaaacaaaacacgaacaaaacaaaaacgagaattgagtcaaaaagagatgagccgacaactgtggcggaataaagatcccgcacagaattatatggcggattaaagagggaaagaacagaaaaaaaactgtttttcctttctatgttcatttttaaagttagggtatattttgtttttacagtttttgaaagagtttttatacttagaaagttagggctttatctaaaagataaaaaacagagtaaatgagtaagggaaatacgaaagttgattcagattttgtgtttctgattgtatttttgatatattagtatctctctgcttgaattagcatcaatgaagattataatttataatatatctaatgttaatcgttctactaccttttggatattacatttaagacatctcttcaaatagaagtgtctatggccatatatacatgtatatatatgccggtcgttttaatatggttaaaagacgtaagattagaggtgaattggcaccaatggatagaataactaattctaatactaatactaccagtaacaacaacgacaacaataataataatagcaagtctgatttagttgtacttaacggatcaaaagtaagaagaacttatagaaaagatcctaaaatagttagaaatattaataataatttagttactaaagaatttgtcttcagcccagaatcaataccgaaagcttctgttccatctcataatgatgatgctaacgaacacaacaataacggtgctaataagaagacattctcccatattacccctcattcaggtcgtatggtaacagataaagatatcgaacattattcaagaagactcatctctagttcaccatcctcccaccccatagagaccgatacagaacctcaaatcttagaagttaatcaaataaatagagataaaaataaagaactttattccttcgaatttgctaataataaatccgacacttcggaaaatagaccacatacttccggtaaaggtttgctacattcatcaccaataagttctggtccatcttccctttttatgagaatggttggggttttaaaatttattaacgaaagaggttcttatcaatctattaatcaagtgtccttgaaatttaaagtcgataaaaatggctgttttataagctttcagcataaagaagaggaccttttgactagacctttatcatttgagaaggattgtcatgatttatactttgattccaactattcatgtttgggggtctttttgaataaatctatcttcattttttctgagactggtaatggtgggtttaaagtaaggactagattgattctttgggaaaataacgaggcacgaacacagaatggactctctaaaattgaaaagcaattatcacattttaatattaaatgtaacatctcagtattaaataaacatacagaaataatggatactttaaagactatacataggaggatttcgaatctgggcaatgaaaatatggctacttctgccataaaaaccattttcaatcaacaatcaagaattaagaaggatagttttttaaataagccattctttaactcattaagtgctaaaagaaagcatacttcatccatgtataaaacatcaacatcctcagtaacgaaaatacatattccaaatcataatactgaaattagtcaaacgccaacggctgtgacttcagttaagcatgttccagcctcctctttttattccaatatctcttcaccaacaaatccatattctattgataataataaacttcaattgaacgttaggcgatccacgagaaatttagataatcttcagaagtgccatcaggtgcttgatttagatctggaagaatcaaatgtatcatttgaagaaccagaggaatttaaaccatgtcttaaacagatgtttaaagataatacatgttatacagtgacaaatcaagattttaaatgtctatataataatgattggataaatgacagtattattgattttttcattaaattttacgtggaaaaatcaattgacagaaaggttgttaaaagagaagaagtttatattatgtcatcctttttttatacaaaattgataagtgatcataatcaattatatgaaaatgtgaaaaaatgggttcaaaattcagatttattgaatcgcaaatatgtagtgatcccattaaatgtaagttatcattggtttggttgtataattactaatttagatatatatcacgattttgtgctaaaacataacagtgtcaaaggaaactattataataataatgcagttggtaataataataatacaaaaactccaattgattgcaagtctattgaagataatagtcaaaatggaaatgattcagctaatgtctctaacaaaaaaaacatgaatgcaggtgacacctctgatagaattactatgcattcaaacacagaaaactcaaaggagtctaatatgttaataaatacgcaagatggatctttcaaagacaatggaggtcatgatgatattgccctaagttgtcccgtaattgaaatattaacatttgattctttaaggggaacacattctagagaagtagaccccattaaagaatttatcatagcatatgcaaaggataaatataatatattgattgataaagattgcatcaaaatgaaaacatgtttagtcccacagcaaccaaatatgagtgattgtggtgttcatgttatatcaactatctctaaattttttgaggatcctatttcaactatggatgtttggagaaatgcaaagagtaaaagtaaacaatctaataaaattgtgaatgattattttgaaaaaaataagagaaatagagaaaggagaaacctaaggacagttttgaaacaacttttagctgctcagattgaaagaacaggtatcaagtctgataacgatactaaaagtatggatgataatgaagatgatgaagatattgagatcatagaagatatgtcaaaatatacaaatttacctgacaaaaacaagcttttaaaagaagtgaaagaagcagagaaggaattgcaagaagacaaggaaattacaaaagatgaaaaggcggataaagaagttagtgtatcaccttgtaaagataaacatgtttctacttcaagaatcagtgatggtctaacttctgatcctccttcgagtccatcagaagaggtacctaaacatttcaagaatccattacaccttgaatcacagaaatccagtccatccagtacaccaaattcatcacgcaatatcgactatactggtataactattccaaaagaagcaatagttgatactgatttcttagaaagttctccaactaaatatcacagcaatcatcaaagggagaaaaatatcagacctatcctcagtccattttttaacaaaataagaagttcagaccgaaatgaaaatgaaacaaacaagaacgataagatatcattgttgcaggaatcgtccaatacttaccatacccaacgttataggttattgagatcgccgaataaataccttgatgattccgtgaatgaggatacttctcatagtgttattgtatcagatgccgacgaagatgttaaactagtaggtaaagataaagagtcttcaacagtggtatcgaatgacatacgaaggattaacaagagagacactgcagaggtaattagtgaaaagatggaacaagaattgaatgagaaggatatatataataattttgagggtaaggatacgttaacaaataatattataaaaactgatgaaagcgacatactaaaaactttttctcctgttatccttagagatggtattaaatcgcaaccagtaaatgagttgatttctctggatgatgattagctattaaataaggctgatcattcaataattgcattaataatacatttagcattatatagcatattaagtcgttattaaaataatatattgtttgacattcatcatacagcattttcttcaaaatatttcggtagcacttatgtcatgtctatagttctattagataattatatacgtctaacttttgtcaatacacagaaaatgagaaatggcacatttctcactatataatcgtatatcaatgaaattgcttaaagcttatttgcttaattctgtatatcataattttcaagtgctcttccacttgcataaacttggtctttaacatcttgtgttgccttaccaaaccatatctttagacttgtcatcaagtatcttaaaataaataaagagttgacaatactaattatggtaaaatgtagctcagtagtatgtgttatcataaaatcctttgttttaaaattgtgtatttttataaaggccatgcaatcatccaatgtattgaaaacaccctggtttaaatagtattcagacaatacgcatccacccatattaaggataaggaatccaccaagaattagtgtagatttcaaagtagcttttaatttacttctccaaacaattcttactatagatgagataggctgattagctaaacgtccaatggcagttggctttgtatctagtataacgtatgaaataacgaaaaaactaacaatttgaataccagaatcaattaccttaacttgatctaaggcaagatggttatatttcccagttgctaaataatcattcaatcttgatagccaatagccaatagaaaagaaacacatgtacatgaccatacataagtatactatttcaacagctctagagataaatagcataaaactagccgcaatcattcttataatccagctttgttgtataatttcaagtgggtttctctgattttcatttgcttgtggttctattggttcatcattaacagcatgttgatcatcgtgtggatcaatggcatgttcgtggaaaaagaatttagatagttgatgtttttggtaataatctacgcttaaacataaaataattgcacccaaacagacatattgtaagttggcatgcttgtagttatcaagtattatagtaataaatgagcctaactcgttcttttttcttaagacccataataaaggcaatatcactagcgtcaatgtattaaaagtgtattgtgaagctaccgcaataccaataatcagcaaagatgcaaacaaccaagttagcacaattaaagagatgtacctaaatttgaaatttggtggaacatagcacacaaaatagtcgtcaaactctgtattctgttgatctaagtaagcaaactcgcctgcatttttttggtttctttcctttaatttcttcaaatctaatggttttaataatttatcatctttcgttacaggaacaaacattgtttgaacatagtttctggaaacaatatcagaagatggaacacgcatcaacataccatctggaatgaaatatgcatggatcatatcattttctttaaataattgtttagcactagtttcggtttttggatttgagaataaatcaggattggaccattgtgcagttttaggcgcaaaaaatttatagaaataattacgatataagatatgaccacgttccaaagaataatctttccctaaaataaaagatgatagacgagattttctagagataacttggaagactttaatccaatactttctaacaagaacgataacatttctgttgttttcaatgattaatttagctaaataaaaacatgttaacatagtcaacacatttacaaaattaacttcactaaatggtttgtaagtgttaaggaaattgtttgcaaacaatagtggaaaaattaatctagtatggataccaaatccagccaaaataaagattgcatagataaacattgacaggcaaagcctagaaagttgaattcccattggatgtattagactatcatgcaatattttaatatttggatcatctggtgatctgataaagaataacacccctggtctgataatgtattgtctaatcatcccaatatatttggcaaaccaatacatatacaaagttccaatgatccaataaacaatgatagaagccttagtccaaaaccaacacatttttggaatccataaccaacttgttgatgaatcaaggatcggcgatattaatgaaagatctaacataacacctgcaataattgggaaaccagccaattctataaaaaataaactgaatactttaaaagtacatctaatggcaaataacaattggaagattaatcttctagtagagtttgacataccgtttctacgactgtaaccctttgaaacataggttgaggcagtacagatcatagcaatagcagttaaataagttgttagagcaggtacacttctaacaaacaaagacgttggcagagtattatgcacataaccgtgataatatttcacaacaaaatgagctaaattttcattgaaccaggcggctatattgttgaagtatggacttttactgaacaataagctaaaaacactatcacaatttgttaaatgaaataaactgattaaaccacgaataaatatactaatgacacttgagtataaataaattagcatataaccaagcaaagagggaatataatatgaaatcaaaatatagatgctaataattgcaactgctgccatagtataaacaagaaccatggttggttttaaattaatattaatcaaaaatggtgctacttgttcaatattattttggttgccctgtaattcattaataatttcttgtgcatcgatgttttcgtttgcattccttggttgttgaagtggttgtggaggacgtacaggacggactaaaggttcagcaaatacattgttattatggttttcctcagcaacttcagcaacatttcttaatgcctgatttctctcttcttgtaaatgatcaatttcatttggatcgatattatgatcgccttcagaatccacagtatcaacatctgaatcggtagtatgatcatcacctattacataatctggatcattaacttcagtgtcatgaccaccttcttcttgttcattattttcttcattttcttgttgttgttgaccagttggaagctcatttgtgtgttcggtgataggttcgatctcttcttcaggtatatcaaattgtctgttataggccctttcttcttcgtctagtctagcttcatgttcacgtctttcacgatctctcatcatggttgctacttggtctagcatttcatcttccatagcagggaaggtcgcttttaaacgatttttcatttcctccacagaaaaattggggccaatcttatggaagaccattttactaaacacttcttctctgacgatcatatcatattggaaatacaaagctaaatgtagaataataatcaatgcaatttgtatagatgaaaatttagtgttttccaaaagagttaaaataattgaataaaaagaatagtcaaaactttcattattaaaaaaatatttttctctataacctaataaaacacttttccaaaattgaccatgaaatggtagttgtccatctaacatgaaagtgtaacacttaccaaaaaaattccatactaatggtataccaaagaaaaataaattcaacgatatagcgattaataaagtagaataaattttagcgacacaatttaataaggagttttttacaatttcagatatcgggatatgatcaggcatgttatcagaatacttggttttgaatttgaatggataatggcagatatcacattttatgatactcccaggtttatttacatcaagatttctagctgaaatccattctaatagacaaggttcatgcaaatatttgatggaacctttacattcacatggatgaaacaaaggattatcaggagtagcttcacctctacagatacgacatgtggcatttgaaggaattacatttgttgaagcttcctttggtgcagaggtactatcattatttggattaaatatatcttcattaatactattagcactcattcccttttcttttttctttcttttctttttgctatcttttatatgtatatatatctatattaaatgtaaaattaagaaatggttggtgttcaaaatattggtgatagttaataataccacttgttaaaagtagaagaagatatcgtgatactgaggagaggaacaaaaagatattatatgtttttgttattcttttttgtatttcccttttatgtgtgctgtaattagtcgataaaacctactgtatatgtttgcttaaatagatgtttactttagattgacttatgttgatatgtcgaaacaagagtaaaatatatatatatatatatataaagacatgtgtttacgcatgtgtgtatatatgaaaggaatattgtaactttaagtagttgttttcctccatttgtttgtttatttggtctttctaaaataaaattctttaaactcatcgctcaattttctgtcgtttgcagtgattttgtaaaactcaaaaaaattttataacccagatattttttgtgttagggttttcggtatttgtttggcaaaacaacggaagtccttgtttttataaattctgcttttttaggttgttttgttttttcttttatttgttcggaaaatttcacaaaagaaaccctaagggtttaaaatacgagaaaaataaacacaaagcatgtgattccaaaggatggatttagtgagacaagctgcatatatagaaaagaagaatagcaacctgtatagatcaggaatacccaagaaaaactgaggatgcactaagcaggtttctttttctcgttagttcgtattatagaacagagtgggtaacactattgaattaggaagaatcattctccagattattagagaattattcaacatgttattcagatttgatggaatttgaagctcttaagaatttattattgagaaaagagaagaaaacaaaatctaagattggttggttggttgattacttatttatatttatatagattatatcctttgtttattgtagtattccaaatatttatatcgttcaacgttagaaaataaaaaataaaaaaaaaatctttcactgtctttattattatagaagaaggcgatattatttctattggtttccagttggtttttttgctatctaatttctatgaactttcatattaagtgtatagtatcagagactactgattcttcttttttcgatagtgcaactttctttggattgaaaataaatttggcacatgtattcaccatttttttttaaaattaataataggaaaatctgcaaaaaataaaacaataccgtatttatatgcattagaaattggagaaacaataattatcttctatcattaaatacgaattttcaagttgacaaaaaatcatcgcagtgttgttttttttttttcagaaggattatctgtctttttatatattcattgattagttggtcaattgacatttagttgtaactactctgtccttctttttttttttttcattcgtagacaataccataatagcagataatttagttatatcacttaataaacaagtcacctcatacactggtaaaaaaaaagattttaatgtcatttcttataaaaattctttatattgtgtcaatattacaagtactacattccgggttttcaagttatgaatttcatcagctagtgaaaaatacaaattataaagatcattattcattgcccaaagatatccaattagagtgttgtattggacttgctttatttatattaacttcttttctatcctttaccaaattacagtattatcctatcaaaccctcgatcaataataaattgaggttactgactacagaccaatatttgaaagatatatcattaagtagagctaataatgttcataatttaattggtaacgatccaaatggtgaagttacttttacaccaaattttgtagatttacaaagaaagagaaaggaaatatcagattggttagcagacaattctaaagaataaatatatttcaaataatttataatatgtcagaaagcaggtttttacccgtttttgaatgaataaatggctagattttttttaaacgcactgtattattataaaagaataaaaaatattaaataccctaataaacctagtattattgaatttattttttgtttattacttgccttttacacagtaatctccttctttctgcaaatttatagtataaatatgcaattctatagaaattattacatttgatgttatgtatactattcgacaatttagacatactaaatagtttgagacatttctctgaaatatgttacagtttgtggcatattatccatctatatcgaagacagttggtcattataagagattaagggttagcaagtatgacacacctgctaaatattttattgtatttgtatttttaagttttgtcaaaatggtctttacaaaaagtggtgaaggttggtatagtagtcactagttattaacagtgctataccttcagaagttattatggcaaatcaagattattcttcttactctttttttaagtgtgttaaatgctagaactacaattctgactttaattttagcaacctatattaccaacactgacagaactggtttttaacattacggtaacttttgataataataataattcaagatacgaaagcataattgcaatatcttcttaaggctcaaaagttttgtaaacgggcatagcaactactgattgataatatgattctcaaatccttacttttagagttggtaatttaaatactcttctcacacaactcaaagtaaatcagctgtttctgttacagcgttatttattgatagctattaactccatacgatgctttatccacattattactacaatccatccattagttcttcccagtcatctagtgatatttttcaaacagcaagcgttactattcttttctcaaatggagataaaggtaatttgtaaaactcaagattgacagtattgcatttaatatgcaattttctttttctgttcttatgaaatcaacttgctattggttttttttacatggataagtgatgttaattctttttgttcttttttttcttttataaaggatttataatttaaataacaattgttcatatttgttttataagttgatcggtagtaggtaactagatgttatataattgaatacataccttatattttgtgttaaccattaatagcatacatactcaaatacttctgaaaagtttaatttttttaaaaaattatttgattagtttatgtatatcttgatacttgttggatttctgctatagcatgctaaattaatggcttggtataagtgacaaaaaaaagttaataaagtaaaaggccgatacttgtttatgtaggattaaaaaaaataaaatagtcttaataaaatctctttgacaaatcaagtaaacagatagtaagtgatatgaatatacaataaatcactgttgagtgataaataaaaggtatatacagctcaagtttttggaccttacatttaattcatcttaagataatgtaataaagactagcacttatgttattatttacagtgaatattcctagcataatagaattactattatgtatttcttctgaataaaaatatcttgtgtacattggattcttcatgttttaagtcacaatgttgtgaatcatattaaatatcttcaatgatatttattaataaaattgttgttgtaatatacaataaacataagagttttcctcttgtttttttataatataaatatgtataggtttagagtcactcatttgtatatcctttatttttaacgaatattccataataatttatccttttatcttttataattgtatggttgtgtaaaacagtttttttactatagattatgcattgtatattttggtttagaggaacttttttcatagaaaaacatcgaatcaatctttatttttgttgtttatactttgtgggaataatgattcacagaacacatatatactatcctatatattttagtttaaatatattcaccagtcttgtttcaaattgggagtgaatatcatcttaagctccctacatttttatttcatgacacaattggccttttttttttgaaattattgactaccagttaattgaattcaaaaaatttttactttttatacgaatatctcttaacctgatattaaaaaaaaaaaaaaacaaaaatacaaaataatcattaaattgatgccgttcatagaagagatgtggtggatatgaaaatatataaaaccaacaattctcaatataatatttcttcctttgtatactttctatatattatcatctctatatgatacatacagaagaagatcgaagaactttaatataatttttataatataatattgagaatgttccttacttacccagtaactatacgtgctaattcctgacaattggtattttgcatactttacaaaccttttattaacttattctctctttatatgatatatatataaatacaactaataaatatatactgaaatctaaagatttacagaagcaaagtaacttactattaaacaagattttgtggtataatgattttatataatcaccaaaactcttgaacattaattctattacataagattcgctcccaaagatctataatttattgttaccctgccaattattttattctaaactctcttatgaataataactccagcatacaaattcttgattcattggattaacacacacacatatacatatatatataaagaaagaaaattagaaagaaagaagaaaaaagatgaaaataataaaaaaaaaaattaaaaatgaatctaacgtgtaggatcatttaactttaaaacttctacaacaggtcctaacaacctttggaatccagatttgcctaaagtagctactttagtcctttttgttgttttgatagtagcttgacgtggaacatcttttaataaggctaattcaccaaagtaatcacccttacctaatgtagctatgacacctttaccctctttaatcacttgaacttcaccatattcaatcaaatagaaattttcacctctatcaccttcacgaataataatttcatttgaattgaaatattgagtatctaatgcatcagctaatttactacgttcataagtagtcagtttttgtaaaactgggatagatttcaatagatcatcatataatactctctttttaaaagaagaacccaataagatttttctaaacgttaatctatctaaagtccaaagtatacaatctgtagtggccacgactgtagcagctcttggattattatacattaaagccaattcaccaaaactagatcctgggcctgatgtgctaactctaacatcgttaacgtagaattcaacgttaccatcctctacaatgtagaaataatcaccctcatcaccttgtttaattatgatatcgtttgcctcaacgtgcttctcttcaagacaattaatgactaatttcttggaatctggatccaatctattaaataagaaattcttaccaattgatttttccaatcttttcaattgagcctccgtcttttctttataattttctggagtccagttatcaaagtgagatggttgtagagtttcaccactaacagaagtacgtctttctgcattgaatctagatggaattggatgaaaaacttcttgttgttgttgttgctgctgctttgagttgttatcattagaagaaatatcggaagatgagtttggtggtggggtagacttacgttttgttgtaggatcagatggatccaaaggagaattgattctctttctagaagcctcttgtcctatattaaacccacccttaaaaatattattattaaaagtggatggattagaggaattctgtgtaatggaaattggagaaccagatgtgataggagaagaagaggaaggtgcaggaacaggtgcctttattgaaacttgtgaattatttgtacttatacttatattactaattggatcttcatcagtagcgaaagatggcttaaagagtaaattctcattatcaggggttttagctaatgggtcctcactttcgcttctactattattcttgctagctgctgctactgttgttgttttggataatgaaagttttgagctagaaccaaaatttggattagaaaaggtgatagaagttcttgattgagaacgagaattgatcatttgcggagaggttaaagatatagaatcatgctgtgacataggagggaataagacaatacctttcgataaactcaactcttcttgctttttaataaattttctttgcacctctaatctttgattgaaataattagcaccaaattgtaaaaaatcagatggattccttaattcaacttcctttttgaattgatccaattcaaattgttgttcttcacttaaaggcatctcaaacggtttttgtttttctttcaaaaaaggagaagtaaaataatatgttgataataatattatatgtgttgttttatttatttatgcaactgtctgtttattggttgatatttgttcgagtgtgtgtgtatttatgaggaaaacagacaagccaaaaagtgctaaaagggataaaactaccagtaaattttcaaatcgatagtatcacttgccataaacctctacgaggacaaagaaagtgatatattaagtaagggctctgaatcgtagctgaacagaggtttacgttttacaagatcccttgaatatttttgtctctggcttatccttgcaattaattgcactccctgagtttctttctggctgtctgcaaaatttccttgtttttttctttgtttcttcctctttcctcttttttttctttttttgttcctgagcaagaaacaccatttagggttggtaaaactccaaacccaattttcttttaaatttaaacagatatattagggctaactaatattttactctctcttttccttagtcatttttattgacgaaaaattatttcaatagactgatctttattttatttaactaaataaaccatttactcttccaaagaacattaaaaaccatattcagggatttatggtttttgtttaacttttaaactcaactggtgccagatttggccatatactgggttcaatatattcaagtatattcacatagttatacattgttcatttgctctttgatggatagttttaaggaagcatgaaattatatattaattggatactcatatcaatattcctattctttggtaatgttaatactcacgaattaaatcatgaaaccactttttctaattcttattccaattctcactctcactctcatgcctactcccactcccactctcatactcattccaattttcaaataaatagtataatttcaaactatttacctaatttcatcactatatggtcattatcgttacagaattatttaaaacagtcgatatttatatggtcaaatagatacaactcaatgttagctacactaatcattcaattgttgccattttctaccattctactattaattaaattgaaatttaatctaaactcatcacttatcagaatcttattaattccctttgcatttggtactttgctaagtgatattttattacatctattaccagaatgtaatgcctataacttatcatcatcctccacatccattactaccataaataataacaataatagtggcattggaatctttttcggtattttattgtttgtcactatagatcaagttgttagaattttttcgacaacggacaccaatttgaacgacaagaatatcgagaattctaaccacaacaataataattatggcagtcactcacattcccacattcttttaacttctgaaaaggacaataattcaaattacagacagctaaatgcttcaataatattgaacattatttttggattactacataacattactgatggtatggctgtatcgtcttctttctattcttcaaaagaggttggcattatcacggttatcacaatgttatttcatgaactaccacatcaattaagtgattttgtaatattattatccaatggaatctcaatcaaatcctgtcttataacccattttttcaccatcttaagttctcttataggtacagtctttggttgctatctaaatgaaataggttcatcctcctcctcctcctcctcttcttcttcttcttcgtttctcacttccacatctttattattaccgatgattacaggtggattaatatatatctcaatggtatctattttacctgaatttattactaagagtcaaaaagataaacaagattctaaaacgaaaagattattcaaagttgttttacaaatcagttccattattattggttttattactattgctataatgtagtaaataaattaataaataattttttgataaaatatagcatattcagattctcatagtttttaaaaacaaaaaaaaaaaaaaaaagaaaaaaacatttattataactacaataatgcagacacatatatcaattgatgtagtgggattgaattgatattagtacggtgcaaatttcaacagttttccttcatcattaaagctagcatcataaaagttacgttttgtatataatcatatgtatagttattaatattattattactttttttttttttatatttatttttttatttttattttttcttttttttttttagttacccccccctcgctcctctttgtctttgattcacatatttatccacttgaattatagacaaataaattgttgtatacagaaaagctatgcatacttatgttcgtgtgttacctattactaaagtactaatattacttccaatgatatatatatatacatcccgagttgaacaaaaatagaatttcctttcttcccctccccccttcatagcatatagttaataaaaatattattaaaaaaatgagtttagatgaaaaatatgatgctgcattagaccttttacgtcgtttagacccaacgaaagtcaagaccaatttaaccaatttaataaatttggagcctgagttagccgaagatttattatcatctgtagatagtcagttaattgtaaagagagacccagatagttcaagtaaagaatatttgtgctgtgattataatcgtgatattgactcctataggtccccatggtcaaacaaatatttccctgaattaaatgaggatgattcacaagaatccccctttcctaacagtcaactaagaaaactggaagttatgtgcaacgattcgtttgagatctataaagatctatactacgaaggtgggatatcaagtgtttatttatggaatttggaagatgaggactcagagagaggcgattctgagacagattttgctggtgttattcttttcaagaagggcaacatcggtgattgggacagtatccatgtattagaagtgacacgctcccctgataatagcggtatcgagggatcagaatacaattacaaagtaacgaccaccattatacttcatttagaggataaaaccaatatcgatataaaattggcaggcaatttaacaaaacaaactgaaaaaaacttcatggtaaatgatttaaccgataatttagaatctattcatattgcacatttaactaacattggtactatgatcgaagatattgaatcacagatgagaaattctttagagactgtgtatttcgagaaaacaagagatattttccaacaaacaagaaacccaaatttaactaatctggaatataataaagaacaacatgaacaactaattaaaggtttacaaaatttttgatatcgctaagtctaaatatgttcatttacataatttttctacatatagatctaaatctatgaatatataaatatatgaatatcatattttgcaaatttttgtatgaatcaaccaactcaaataaagttgcacgctgcttacgtaatcagcagaaacaaattatcgctacatacggaaacactgaattccaccaattccgggatttgtatgcctcttttaacccgccagattctgaatttttgcggaaagcacagtacggaattttacaattcgtattccgaagtctttaaactccgaaaaacacacaagaaaaaaaacactgttttgcatttgtaggaatcttttttttttttttttttttattttttttattttttttatttttctttttgcgaaagactatttccagtttccagttcaccttcctttccctttttactagtttctttgtaaaggagataccagaaaacgttaatcagcaaggtgtatatcagtcaactatttcgtggagaatcacataagcacatgtatttgtcttagcaaatatactgcaacaattaacctaaacggattcaataacaccgtaattcgttttcattcaatactaacgctttcgtaactctttcttcctaccctgtattcccaacccaaatactgactgaattgataaactcacagatttatacattcttttacttttctttatcagctaattactattatcattcattttcatcctaatccctctttttgtttttttcgcttttcttctcaaaacaaaaagaaattatatgtatattacggttttttatctatattctttcttttacatcctttgaccatgatcaatcctgaagaaaacaattttttatctgtagaatcaaatataattacacccaataatgactcttcaaatgtgcaagagtcaaatagtactggacaacaacaacaaaatattactgatcttatcaataataacgcttcaatagatgatatcctctctaatagaagtcctggtttgaataataacaaggatcgcataagtaataatactcagcagcatgagaacaacggttctgtcaccactagtattaataatcagaatacaaactttgttaccgatattaacacccctctatcaaaggcacaagattcaataaccaatctatcagaaacagtattaaataataatactaatattactactactcataatataaatgaccagcctaatatacagacaaccaaactagagtctgataatcgatcgattgaattatacatcttgaatgaattgaataataataaccaaaaacagaatattaacaatcagggtaataatgataataataataatgaaacatctaatgccaaaaatgataataaattcacgtctcaattcactacagcaacagaagattttcctccctttattgacgcaattagttcaaccataaataataatagatccttgcctactaatatcaataaaaaattgactgatgaagaaaggcctgttagaatatcacaaaatgccacaaagcaaatgccacaacgacaacaagaaacaagcactgatattaatccaacatctttacagacatctgaagttatagtagatgatctaccctttatcaatggccttgatacttcgcttgatcaacctaacttacagtccacagtatataccaataataataaaaaccagaatgatgacggtgctgataaaaataatgatactagtaataataatacaaataatcaaaataacgatataaatgcaactacaaatacaaataatgatgatgatccctatgtaaatgaacaaccttattacgtaaatgcaaaacaatattatagaatattgaaaagacgttatgccagagctaaattggaggaaagattgcgtatttcaagagaaagaaaaccatatttacatgagtcaagacataagcatgccatgagaaggcctagaggtcaaggtggcagattcttgactgctgctgaaatcaaggctctaaaggaaaaagaagctaaagaaaaagaatcacaacaaaaagaaagtgacggaacaagatcagtagataaagataataacactggtgacactagctgcaataataacagcaataataattgtcatgatgacaatactggtaaacaaaataatacagaatcaagaattggcaatatcagtacttctgatagtataaaactaaaaagtcaattaacggtaaataagataggtaataataccacagactttcctgtaaataaataactaactttaaaggtcaaattaaacaaaaaaatcgttaaaaaacattttggatttttgactcgttggtatcaacctagttatatataaattatatacttttaacatgataaatttcatttaaccaacaacattattttgaaatattatttcaaataaaaatatttatatatcttttcaacatcttgtgtaaaagacacttttttctacttcccgtatgtcctacatttatgagttcctttattaatatctaacaatcaagcatgttgaaatagatatgcatataatattcatgcataaataaagatgtgaaaaatgctcaatctgaactacaaattttcattttagatttatcaatatcattattatttaatagtaaatcaatataaatgtatttaactttcatacatacttatttatataatttttttaactactcataatttgatttaatgcactctgggattcagtacttaactgggagataattgtatttgtatcaatattagaattgtttgaattgaaaaacttctttatattattagcaatataattcttaaaaccttgagtcaaatctatttcaggtattggatcacgaggcttttcactaactgatgccaacttactgaatgaagaaccaaatgtggaaatttcttccatattatctaaatcaatatattctgtatttaaatgaccaaggttatcactgataatatttttaattataatatccaatgttggaactaataaattagcaccgtatttatttataaaaattggactttcacaaatcaacttacaaataccaacaattgtaattttacgatctaataaattagccactgttggaatagtaggtatgacaaaagtagtccaaatttgttggaaaacactatcttgaacttcatcaataaattgaatcataaaatcaccaccatacttaagagttagtaagtttaaaaatactatcaacctcttcacatatcgttctgtctttgacgtctttaatctttgtaatagaagtgttgcaatttgtttcatatatggtcttaacttatccaaatcaatagtcaacataatatcttctaataactcaaacccatacacctcgtatgccttagaagcaattaatctttgaaaaacaccaagaaccggaatcaaatcagaaaatacagatatgtctgttttaacaaaagcccttaacattctagttactgcaggaacattaccctttaactcccaaactgatggtgctaaaagtggttgagccaattgtttaatagaatctggaatactagatcctttttctacacaaaaggccaaaatttggaaaatatatggaatgaattcttggatatcttctgacaagatgcgtaagaaacttggcataattaaatcaatcaaattaggtagaatatccgacgttgcataattcaaaattacaccaattgattcaaaaatgtaatgagaaaaccttggatttgatggattcttagaaacaattgtcacaatagaaattaattgattcattaattcaggataaattgatatgattgaactttctgctgtttgtaaaactctaaaacttgctttcatcaaaaattcattttccgctaatttttctggagtagaaccttgtttcataattaaaccaaataaattttttaataacacttcagcactacctgctacatcttccttagtaaaaatgagttttgaagaagttaaagattctcttatagttaaaatcctttcaatggtaacagcagcatacgtgtataaaatatattcatttgattgcaaaaatccagctaaaaatggcattaactcaattaactgatttttatttaactgatttctgaaaatatagatgaatttaatggcatcaatccttaaaataagatgtggaattgaggaactagtcaaatctggtaatatttggtttttgaaaaaatcaagcacatctaatagtggattagtagatgaaacaccattattagacagtgaaccattgatagctaatgtagtaaacaaataaacatataaatctttaaatttccaaaactcaactgggttggactggtatttttcgaagaaatacttcatatgatttaaaaaaatctttgtcactaaggtacaattgttttcttttaattcttttaagaaatcggtacatgcttttcttcttgtgtcatcgtctgaaccttccaagtctctacgaatatattcgattgggtcatcttcaaataattcaatatctgcctcacgtaaagtaacatttggtaaaataatttgctcagtgaccctattcattgcatcctctgtgttaaagatagtaaagtgtcttggattacgacttacggcagtcaaaaatgctaaagatttcgagaccaaaatatcatatttaggttcctctgaggcggaggtcaacaattgccaggtaatttcgataaaactatcaatcattggaccaaaaacgtcttcgtatctagttgtgtacagttggaccacttcttgaatcgatgattttattttaattaaggtagtgacgtgatctggatcttctggatcttctaataatcgattattgtaagacaaatatttatgtaaaattcccatgccctctgtgatgttatcttcaaagaattctggaatatcttgacaattaaaatcatagtacagtttggttaaaagtaacaaaacatccatcaatttatctaattgagagacattattaacattagcgtcaatttgttcatcgactaattttaacaaatttaaaaatggaacagtaaacacatcaagaaccattttaatttctaaaaataattcatctgacctaaacaaaggtctccatcttttgaatatagaatgagccacagttaatacacctttatttaataccatatcatctggagatagtttacctgataaatcttgtaaaagatcaggccaacgttgggggaagtcagaatctgcaatcaaggagattgcttcaccaatttggacctgtaaattatttggcaaagagatcattaacggtataatttctttcttaatcaattctacctgatcattggacaataaatggtttccattttcatcgacccattttcttctaataaaatttttaaaaaataaagcacctgccaatctggttgaaatagcaagattagaggatgccactacatgtaacaaggttaaaccaaagccgttttgattctctaattcttttaagctcctctctgatgttttagctgttgaagcaatcacagattcggataatagtcttgccacggtctctatatcagacattataacacccaacacttttggattctataaatttaattatattttccaattgacaacaatgatccaatgtaatcgctaattcgaaacttgtatcttattcaaataatacaaatcttgttaaacatattaattcttctcttcaaaattgaaataaaatttttcactttttctttttctcttctttaaatttctttaatggaagacaaaaaaaatatcaaaatatatgtatatatatgtgcataattcaattgaccatgaataaatagttaaagggaatgaaagaaggatatgaatatatatataaaaaaggtcactaaaatgatgctatcctttatttagtacgtgtttaataggtgccaaaatacttagcttttaaaatactgctggggagaattaagggttgaagcaaatactaaaaagttggaatactggctaactatgaataaatttgagtaatggagatgtacacatgcaagtatatacgttaaatagcaatgattgtttgtcaaaatactttcatacctatggatgctattatctgattgtaaaatattcatcattgaacttacttttaggatctatacttgccaagacacgatctgtatcctttactgcagaactcatgttatttgagatcattgataatgctctattgttctgatctctcgtgtatattctaacacctctcagatgtgtgtctttcccattatcatgatttacagggaataccaatcttaatatatgacacctaatgggaatgttttgttctccctcactatcctccaggcttgggaacttctttacataccactgagttatcttacctatataccattcttcataatatattagatcagatatactatctccaacatatagcttaaccactttcggactataagattcatcgatttcaaacccaaaaaagatggctaacagtgccagttctatccttttgctaaaatagatatctacaatatatggttgactaccgtcactttgccaataagattctggataatcatttataacattttcaattggattcgaagtcttgaacgaagatgccttccaatatgcaagattactaacattggtcaaatcttccattagagacaattgacgaataccccttagatatctacgatgtaacctcgtcttggctttagacaatttctgatctatgtccattgaatcatcactgccttcctgttccctgctgtcgtcactgtcgattccaacactgataaatgtattattggaatgattttctctagccttttcatcatttaactccacaatattcttgaaaggttgcctgttactgccactgattggaactaataaatctgtaggagtcaacgaatctagcacagcatctacttcactgtaattcatttcaatctcagtaaaaaaaccaaaaaaaaaaaaaaaaaagaaagaaagaaaccactatctttctcgtgtaacaaatggattcctgtctatcagttcccatagtctatcattaagtagttatgaagtacagtttctttaatcgactgtctcggatttcatcatctcttaatatttggttccatttcctttttcttttttcttttttttttttgtggacaaaacgaacaaaaaacaataaaacacaaaatccgtcatgcgaaattaaaattctccagagtaggattgcacgtgactgttttgatccagacgaaatagatccaaatggtcgatgcaatggtttatgcaccaactaaacaactcatcagattgcaactatgaccatagaggccgttatgctagtcaattaaacgatttttgtttcttgtttcgtttgcttttttttttcttttcctttctttctttattaagaataactcatttgccatttgctcccttcgtcttaaagattgaaatcgtctctatgagtacaaatccaatcttctccttttgttagacattttttaactgctaggatcatatcatttcttattttattctcactactaaattcttttttgtatgtttcatatgtatagctgttgaaatccctgtttggaaataagtctgtaatttttttccagagcccatatctactgactactgattcacaaccccttcgcaacggcttgcctggctttgtgtaggttccattcttaactccattgacaatcgcttgctctaaaacacggcactctggatcattgaatatttttacaacactgattggacttggctctttatccttagagatatcatcaataaaacagtcttgacttgacacaatctccagagaatgaacaggatacgaacaattttgcaatctttcttgaaaacacctatgtaatgccttatttgactgtttgtcaatatctgggattatcatgtattttaaatataccggggtatccattaaacaaaatgtgagagcattattcaatgaaatcacttgccgaagacaaattttatcagaacaggatttagataatgtcattttagaatcttgacgtcctggttttgtccttacatatcctttctttttgaagttgaatcggccacgcaaagtctggttctttgatggtatcacatactgatacggatcatcatcggagatattgactagtctttcatcttctgtaaaacacgaggattccattgcatccatactggcatccccacaaggtagtctagaaataaataaagctaaagaccactgggaattccaccgatatttcgaaatgtcaccattatcactatttctaatactcttcaaaagatattgagaattttccccgttctttaattggatcatctcatttaagagaaaaacattaaaccccctaattgccagtatttcggcatgtgagtcatgaaccatcttaccattacttctagcaatctccaaatcagggacagttttcacaccagtggttaatgtaagaatatgtaatgaatcatcaatagattgtccgtcattacgtaccgctactattgaggccaatactgtgcattctctgattccgttggatttcactttgggtttgttggtgggtttcaacttcacatattcagcataaacaagtcttgtaatatcgtttgccaaatctgaacatgtcatcttttcctatttgtcttcttcccctctatcttaccaatcaaaaaatgtacttttattcattgcatacagacgtcttttattttaatacttggttcatatacataatttgaagaaataaggataagaatccatcaaaacgaaacgcttcatctcttcatatcttcacgttttattaaaataacataaagtattttaattcatattagttttttttttttttggtacacttctgcacttttgtttgtagaaaatttccagtctttagaaagtcatctgaaaagaaactcactttcctatcatctttttttatcactaaagagagtcaatgagcaaatatatgacaatcttataaataatacaattcaaaacagtactgcaccattgaatacaatttaactatatccttgaacatgcaattgaaaatattctaaacaaacttgaatgaaattgtatatttgaaagtaccagaaggaacttgtacgtttctatggtaagcccctgcacatatcaacataatcattatttttcgtaaatattattataatattgctacataccatagtacataagacaaagaaactagtaaaaaaataaataataacacatcttataaatgcacttcatttaaatgcaaatagatcgtcaaaaataaatgttcattgtagaatatagtagggcacctagatatcaatgttaaacttaatatcaatagatccaattatattttctaatccacctaatctcttgaaattggctaacagtagttctttttctttacgttctttagcttcttggtcctcttctatctgcttctgttgagctaacgctttagctttatcattttcttcctgttgcacttcttggtaatacattctagttcttgttttcaatctactaaatggatctgtcttggaatcaacagagggtgtcttttccttctttgagtgttctgcatatttaatcttgtccatatttaattttctattctttgatgttaaggcacctaatttcttggttccagtttgatcattttcatgatgtttctcatatgtactaattctcttttcaaaatttctcagttgtgccgagtatttagctatatctctttcattaccattctcacgggcatattgtaacttattcttcagtacagtcttttcaataactgcgttagtaccagataattttttgttaaataacattctattacgaatgatttcatcagtcttcctttctgtgagtggttcattcacaaaagaaaacaattctttactcttgttatttaaaacatgagatgttggttttgtcatatttgacttatctaatgcattcaagtatctatcaaattcactttgtgtaattagaccatcactgaaaaaattcatttgaaatacttttctatccttcccctgtgtaacaccaaaatactgatttgtataaaacttacccatactgtaaggtttttgtaaaaaaactctttcaatcttaaccatacggtacattggttggccagaacgtttatttataccaacattcactctaccataacagcctttcattaaatcgttgaagccaggataaaaacaaaatttggccacaaaagaacgtccaacctttatcttattaaaatcatttaaatctgaatctctgtcttcatcttctgcccacttgacttcgttgtcaatatgagttcggtcatcgtacttcgattttcttgccaatggattataatctgtctcatcttcaaggtaatcttcatcaccgtcattataatcatcttcatagttatattcatcctcttcttcttcttcatcaccctccttatattcattatcgtcatcattatcactataacgacggttttgtttcttttctctttgtttttttagttgagacaattttgaagacatcaactctgtgtggcctgtagcatgtgttgttcttccagatgatctagtcttagccattctattcttattaatttcttgttgtcttctacgctctcgaaatagtcttctttcttgatatttacgcataatctgagatctttcaaatagcaaagtttcacgttccatttctggtaaggattccaagtgttcacgatcctcttcatctttatatttaccttccaaggggaatggatttggttcctcttcggattcctcgtttgatacatttccattataaccaccagcagatacaacattaggattataatcatcttcttcatcctcttcttcgctatctacatcgatccttctcttttttgaggaggtattttcttgattttgttttgttctttttgaagaagacagtaagatttcttcttcctcttcttcatctccctcacctgcacctgctaacgctaataaatcttcgtctaaatcagacatatttttttttatttcaataacctactgcttttcgattctagtctgccactagttttcgcaacgtattccaattaatctgtattactgtaatcctatcttatagggtagaaaagaaatgtcaagtagtatgctctcctttatcattatctaatttacctctattttattcgtcaccttgccaatcagtcaaatatttaaaatcttcaatagaagaaaaatagaacagtttgtttcgttggaagtgagaaaagtagggaggaggaccaacaataaaataaagatgacgctattgaatcatgacaatgattaactttaggaggcatagatggctccgcacaagagatccatagtttttagatacacactgtcaatgtacattttaattccttattcttcttgttgttattgttgctttttttttttttttgatcaaattaaattattgttgtagaagtatcttttaaataaaaagaagaacctaagtatggagatatacgtgtagacatacagatagatacgtacaaatacatatattgacttacaattatttcataataaatcttgtgtaatttatttcttggcaccatacttgttaacagctttaccatctgggatagtgaaaaacgtgtaaggcttgccatcctttggtaaagaatccaatctgaagtaaccctttctttcaaattgaatgatgtcaccaactttcatgtccttaacattcaaatcagcaatggcagcattgtggaattcagtttgtggggttaagaaatcagcaaaatcttcatcgtcttctaatctatccttggagatcaaatgatcgaaatcaactaaatctacagtaacaacgtcattagtgtctgctaaccaagtcaatttatgcttagtctttttgaaatcaccttccaaatgtagcttaccttccaaagaaccatcttcattcttcttggtgatgataacgttaccccaatccattaaagtgacttcttcattagcatcaatcaaatcagcatcatccttatcaatgaccacattattgtaatagatgacttttttttcaccaacatctgcattcttcttgtgttttggtttcatttcaatctttggagtctctggagcaccttcaatgtggaatttgactggattagagatggcagtgtgtcttggtgcaattggatcaataactttcttgttaaaggcccaaattaagttccattctaaattgatgacgtttcttgatggaccttgagatagaacaaaatttctcaaaccctccacagtcatacctcttcttctaacacctctaacagttgggaatcttggatcatcccagttttcgactaaacctttgtcgaccatccattgtagttttctctttgacaacaaggttctaacgaaattgacacgagcaaaatcccagatgtgaacttttcttaggtgtaaagcttgtaacatccagtcatattgagcattacggtctctgtattcgatggttcttaaagcgtgagtgacaccttctaaagaatcaacgattgggacacagaaatcataagttggatacattttccaagtggtgccggttctatgatgtggagtaaggttgcatctgtaaatgacagggtctcttagagtcttgttcaaggctttgtagtcaatctttgcacggacacagttcttcaaaccttcttcggtaccattcttcatttcttcagtgaagattctcaagttttcctccacagaacggtctcttctagcagatgggataccttcaccacgttcctccctcatttgttcggttggggtgtcatcacagtaagcaccaccttctttaatcaattgaacacacatatcgtacatttgttggaaatagtcagaggaataggtaaccctatcgcccttaatacccaatagttctagatcttccaagatggaatcttgaaattcttccttttctttcgatggattggtgtcatcgaatctaatgattaacttacctttgtaagcttgagcaaaatattggtttaataaggcagctttagcgtgaccgatgtgtaagtaaccagatggttcaggtgggaaacgagtaacaacctcaccgatcttagcatctggcaagtcgatttcgaagttagccttgtggctctccttcttctttcctgcagaagcagccttctttagatcttgtaaggatttggtcaagaattcatgggcgccaccgaagaccgggtccagttccaaaagggtgtaccaacgagaaacgttgacatagactttattcttgatgatggagccaaccataccgttggatcttaaggcaccccaaacagcgatatcagcggtggagtattttagaccgccaagaatgaaagttcttagattcaattggtgatctagtttttccaaggattgggatagtttttggaaattcttgatgacaaattcttcttctgaagcggtgacccatggagagacagtttcagattccacggcttcaccgaagacttctgggaaagaagcgattattctgttgaaggagtcggtggcatcaccattgaaagtagctggagcagcctttttgtcatcaacgaattggatggtgacagtatctggtttggaagcattgacaatacgagcagcaattaaggaaccataggcgactactggtgccttaccgttgataactaaagtagtagacattttagatgtgtgtttggggaggtgaatgtggaggtgaaagagtcttataaacacaaataggtaaaatggacattacgttgtttaaagaaacattagatgcaattagtttatttgattggtttttttttttatttgtattcttccgacaaagaaaaaaaaaaacttttcttccaaaccaagaaacaaacctgaggactgctctcactgtctagaagatgttcaattctctttttagtagtgaagaagataaagaaagagcgttataatccacgttatatcactttactggtactccttagtgtgtgatttcttcgctcaagcaatgactaatgacaatctagttgtaacaactggtaacttgttaacatttgttcttgctgattatataagggaaagaattaaaaaaaaaaaaaaaaggaagaagggaaagagaagaaatgtaatagctcagattgtataatgtatcaattacatactgtatatctatattgtgtagtataatattattcagtagaagaacagacctctctatattactgcatattattgaatcaaataacatgcgggggaggagaattgacggaatgcagaatatgggcctcggaaagtttacgggttttgttattccgttttgggattctcttttttttttttttttttttaacaaacaatggccaatgaattatgaagaatccttttctcatatactgtaataaagtcgaagacttgagaggttgaatcatatcatgctacacaaacaaatatacaaatgcatgtatacatgtatatatgatctataaactgtcgaaatgaccgtttttgcatccctcccctcagcattttttttgttttaccacagacagtctattccagtttttgccctgctcggttacttcttttacaagtcatatagacaatggcaatttcagctagtcttttcatcaaccaaaagggcattaccactgcccttaagcagccaaaagaagttggatactattctagaaaccaacaaggcgatatattcccctttgatgatggaaaattgaagtattattatctgccaaatagtgacatcgacaaaaatatagaacttaacagtgggttcaaaaaatttaaaaattgtcaacaattgttcaaagatatcgcaactttgcatccaatcctggagacaataatccagtatgagactttgaaaggtaaatctttaaaatgtgacattgtcgcctacagtgaaacgatcgtgaagttaatatgtgcatcttttgaaaattctaagattaatccaattgacatgaggttaatatcgtatagaggacaactatatatcaaagatatgactttgcaagacgttctaaagagaccattgggcatacaagattatattccatttaaatttgaaacagtatccactctgacacagccgttgccatatattgaaagagatatccttgagaaaagacacagaaagatatcgaacaatggagataagtttttctctttggtgaaaactggcataagtaaatcaaaattcttacttagtgaggaagttagttgtgtttatgattttaagcaggataataaagatgatttaaagcattatgcaaaactttgcgtatcaccagtcatatccaatttaaacgattcgcataagtttgaaactctaatctttaagacttggcttagatgttttctaatgggtgtaccaaaaatcatatatgggttctatgatgatagtaggaataataataataataatagtggtagtagtgttttaaaaactgtagaagaattcatgactgaagaaattcccattttatttaaagaacacaacccggaattggctactaaatgtacaaatgcaattaaatggtatggtttattctctgagtggttattaaaaatagtaccccatgaagaaaactctgagattatcaaaccatttaagttaatattggataataatcatttgaaattgattgaaatagaatcaaatgatcaggaatatgaaggtatagtgaatggagaaacaattcttagtgaaaggtataaagcatggaaaaataaatcttaaattcaattaactaatcagcattttcttcatctgcaaatcctaactacatacatacacgtacataaatatatatacttatatatatcaaatagagtaatatgtgtgttaatcgataggagagtatattatacgtacattatttagatattattttttttatacatggaatttataaaaattgtttttttcttacctaagtatacttcacatatattataaacctcttctcaagcataaatacagaatattaacattattacttttatttggatgtctctatagaacaaaccggtacttatttaaagccaaataaaaagttatatcttgaagttcagcatgttctttagctagcagtttcagttcttccaaaatagtttcccttgaatctcttgaatccgccaccattttaacatgagtaataataacatttagtttaaacttttgtatcttattgtcaccgctatttttactgttagatatcgaaagatatttgtcatataacattctcaaagcgcttatcaaatgttttggagaaagatgaccgtataattgtttatcctttattttacttgaacttgaacattctataaatatgccactcaggttagctaaaggtacagcttcaactaaatagttccagaatatgtttaatagatccactttgttgttatttttgaccaaaatctggtcataatccatatcgccaaaaaagataattgcattctttttgactttgtttcggacaagataaaccgtactgtaacttcttatctcagtggtaattttgactccatgacataatctgaatggaacaatctcccattctgggaattctcgtaattgatgactatcatattcattcaaagtttctatttgaagtttaccaatcttggaatcagataaatttggccatattatatcattaaagatgcatgattttaatgcatttgtagtaaaatctaatccatatattgtctttttactttcaacttccttgtcaacaagtaatggagaatttaagatcataccgttaatatgatctaaatgtggatgtgtgataaagtaactaataattccttggtatattctatatgccttctgaagtacggttggcttatcctccaataaacccattaccttgttagaaaatccaagcatagttgtatcaataacattgcttaaggaagttgtattatatcgtactctcttagtaattaatctatctggattcacattataatttacgtctttgctgtccttattgtggcagatattgaaatatctattaaaatcgtcattagccctattgaaatcctctattgtgacatttctatcttcgtccgaaataagtaaagtatccataatatgacctacaccagcaccaccatcaatacaaattgacttcaaattatcagaatctagtggtcttaccatgaaacattgagtagaaaattcagagggaccacctaagccacccaatataattacttcaaaacagaccattatgctatgtacccctccttgctttactttatatattcgaatattaatctcctaaatttatgtcttgcttgtatatatcatgtgtcttcgctacgaattttatagttgttcttctattaaccagcttattatttccttgttattcgttttttgattcagctattatctccttttagttgttttcctccttagaatcttttcctctgctgctatttgttatacagaatgaatcctaaaagacaaagtattcacaagttcgccactagttactaacataaatatacacatacaaataaagagatgtaagaacatataattatgtatgtgtttgttatttagatgaatcatatatatatatatatatatattccacaattttattattttaaagaataatcaaagatttaggagcataaattattgggtaatagagcataccatcaagctaatatgagaaactataattaaaagaaaagaaaagttggaatggtgtcgtttcctacacacgtaactttcaggtagaagattacgagaggttaaaaaaaaggctattacaacattaaataataaaaataatttacgtacacatctcttcatgtatatagttatatttatgttaaaagcatgattgtaacatatctctctgagatttatgataagatgagaacaaaaaaatgtaggatatagtcgattcccggaaggatttatataattttaaaatttcaattttcaaatgatttctcaattaaaccttctgggtaccataacctttaatatcttttgcaaatttccaactcatgttctccacttgtaatccctttttgaaaactaaaccttgttctttgtcaataatagccaaagaaaatttcctggaagaatgtgcatctctgtaatacaaaactttcatactttctaatatggttttttctgctaattccaaatttgttgattcaatatcctcttcacgatcaataacacgtcttaaaagtggaatagctaaatgtgcaccaaacccagtagctaatgttggagaagaatacgttacgcctaataaattcacgtatttcaaaaatggtttgtcatcttccacacctgcaacaattattgcattccaaagcggattcatcttagatctacgctgatacatcaatgtagataaatattcaaatatataacttggctttaaagtttcttcatcatcagcataggaattatcataattattttcgatttctaggtctgataatatttgttcaatatgctgcatatcagaaacatctccagatacaccaacaatagttcttttacctaccggaattaatctttcaacgtcattaaaacgtaaaagagagccatatgcacctaaattgtctgctgcaatgatgacaccattattatacttcattgaaattacagatgtacctgtaattattggctgttgcgtattcatttttggaaatggagaagcactagcaattgtgttattgtaagtaccataagtttcatcggaaggtctgccccaactgaatggatcgtgattcattttagattaattagtatgattttacgaataattttatatttgtattagatgtctagagaaatgaaaatagacaaatttagatatgtcttacttgttggattattcaatagttaattgaattttctagatcgtttctgtattggtattgacattgaacaactctttgttgtatatctttaccctatatgtggcaaatttttatgaaattgggatttaaacacactcttaaaaaagtaaattgtttaatggtttttttttgtcttttttcattttttttttccttcagtacattgtatttcttgttcccacgattttgactttttcatatagtgagtgacacataaatagggactgtatcatattcttcatgaggatcaatagaatgatgtccacaatattcataggtacacatagaaatcttcgttttttggttattcatttaatatatatctaaaaattctgatttaattgcataacttcaaagtaaattacagaactccggctagaacatagacagtaattaagatttatagataagtagaaggtttatgtatgtggtagagaatgtcattgggataggggaatttctttatttagaaagagaaaagagaacagatttatattttattaccaattaattgaattaagcttttttaatcgatttagttgcgatgtggtcatagtttttaaaaggtacggatcaactccatcatttatttgcaaaagaatattggttagattattgttgtatttttttactaatattttagctaaaataggattaaagtttaattttaataaaatgtcttctactctgtaactattattaccattctcttcatattcatcatcttcactatctttgttatcttcgagctcagctacagagatgttagtcgatgtttctttccaaattaacttattcatatgctgaactagtatggatatacttccattaggcacaaaaaatagttcaaaacaagggaatgggaggtaaagatatattttccaaaaaatatcattatcataaaatatcaaatctggatcataatcaaacattatttttattcttttatactcttgtaaacaatcttttaaaatgtcaagatagtaaagatcaccagatgctcgtctttgaaaaaattttgctaattccaaacagataatacatgttgaatagtttaaaactatgtcacaatttgttgcaaaatatctttctataatgatacaactcggtaccttttgtttaattaacccttgtaataatttataattattagtgatcctattggaattgaatatgatcaatttatctttaatattaaattttggaattaagtcaattggaaaacactcatgcaaaaggttgcttatacttgaatcaaaatatgattgacttgatacatttcccatctgttcaatatgcctgagttcagtagtattttcaaagttactaaaaatcccactccgaaaaatatcagtaatatcttcctttgtagaataatctcgtgatattttgtctgtttgctcactagtttttttgttaactttcatttgagactttttatttgcgattattgattgtaattcagaatcaaggaatgacctttttttgggtatggttagagattttttatcagaaaacccttctatcaaaatactggattgtactggcaagtgactgctatttttgttgttttgatcttcaccctcataactatcttttgatttgctttcttttctcctactatctacttctattaaagcttcgttatttttatcatataatataatttcagtgttaatttgaagatttttcatgtatcctctatttctttcatatagatccaaatctgtattgggaatatataatgtgacattagaagtgaaagtgggcatagaaaaatcaactaatgatatttgctcatcttgaaatcttttatatacctccagtttattccattttttaaatggagaccatttcatttgtttcagttgtattttggacaacttccaaaacttggtgatttttgttggttttgaattattttttaatcttttatggcaagcaaatttaaagaattcaaatttatggaattcaatatcaaataatttcaattccaattctttgaaaaacgttgaaataattttgttttcctgttctttatacttaacatcccatattaatatatctattggtattcttaaactgttattattttgttttttggaatcaatatgaaaaatatattgatccatggtgtcaaatggtagtaaagctaaggaaattttagggatgatcttttcaattggggataagttaaaatcttcattttcgtttaatagtgctgtatcttggtctatgtcttgatatgtatttgttggaatatatttttctattataattgatttcttaatattgtgaatatgcttcggtgcactaatcagattaatggaataagatgtgtcctgaaaacaaagaattttaattgtaaagggatcgacatataagtttctaattcgcaaagatataattttttctaaatacactttatcttctttagtaagtgttactttctcctttatagtggtttttagttccttagtaaaatcacgtttgtttattaaagagggttcattccattttggtaactcaatttcttttgttatcttgttaaaatgctttatatgaaataaagaatcaacttcaaagttttgaaagtttttacaacttaaattatttttatctgtagaaattaatttactaaataaagcttttaaatgtttcgcttgtcttttactaagtgtcaaattttctttagtgggatccttcagatatttattggcattcacctcggctgttattttggatttatcaaaaagccaatatttaataaacatactttttgacgctttgatttgagtagaagaaatatagctgatgtgttcaaataaaaaggcattgtggtttctgggaattggttcagagttctcttctgtaagctcttctaggtatttttgtatattgtaaaaggaagtaaatacaaaacaggttttcgaagagaaaattccgctaatcccgcaaattttatttttttgaacccaaacataaaacaagctcttttctcatacatctccacataacactatattagtaatatatttatttcttcatatatagatattatagatactttttttacgagcatttatccccctcattttaatttaagacacactattgatcagctattctaactgttgagaatgagcgcctttattcattggatatatagtaaacattttcaatattatattaaacagatttagtatacaaaattataacaaagttcttcgctttttttctctatatacaacatagaaataataatatacaaagattgtaaataagataaaaataatgtatgatgaaatccttggctttatatatgttaacattcagtcattttcctctacgaacagtaagatatttaataaacaaactcaacaacctttggtgacctctcaacaattattactcaacaatttatcgtttagtgtctgctaaaatcttattgttctatctatttcattatagaatattttatttcaacactaacaataccttacatctgctttcaatttacatctatcattatttaaaactttgtttcggaatagttaactacattatacatttacattttctattctatttgaaataacaagaatatttacatatacatatatatatataactatgtacatgtataagtgcatataaattcaacccatacttatgcattgttaacttaaaaaaaataatgacttcatcatcaatactgttgtcgttatcatcatctagctcagtcagattattcaatatttgatgcaatctccaataaatcatcatcactatccttaagtttggaatcaccattttctatattactttcagttgaagaatttatattttcattatcatcttcctgattattagaccgtttttcaggaaaattgatatttccaatttttatttcttccttttcctccctattgttcttcctattcttatcatcaccatcatcattatcatcatcttcatctatattcatcacaaccgtctcttgcatatctacaacattatcatctaataccaatgggtgacttttatcattggaaaacggtctgatattttctagagttgccgaactctctgtcaattcgactaatgtattataacgagcaacaaaccttggtcttaattcaatattaccaaccagaaacttgggaatattagcttcattatttttttccgatcttgatttaagaattctaaaaatggtttggatatcttcaaaagtgacttgattattataaatattatcctcaaaaagagtgatatctaaagatggtatgtttaatattatctctttagtagtaaattttaattttccataataactttccaaaaattgccgtattgtagccatcaaaacattacttggctgtgaatttatctgatcatcagcacagataataggataagaaatgtccgcatcatctacagtattgctacaactatcattacttgaacttagtccatctatattttttgaatttccattctttttataatcaaataataaaaatgtgtcactattacaatttattaaaactttattaactggtttttgtagtaattcgtttgctatgcgtcttatattagaagaattttcgtcttcttggatatccatatcattatccgagtcataattcaataaatcttcttccatctcgctgacacttttcccacttatccacctgctattatcaacatcattaccattatcctcaactacgacaccagtgtcatctatcaataaatcatcatcatcatcatacccaccccttccactatttttatccgtactgtctatttgttgttcacttcccaaatcatcattaatctcttcaatgcgaccagagtcgatttctaaattaaaatccgccttatgagagtccattactttttgaataactagataaaattccaaactacacagttttgtacacacacacacacacacacacacacacacacacacacaccgtctttctaacaaatggtatttagtttctattttctcttcaacctcttatcaattactcattcccatcccatccactttgtatatactaaagtatattggacttgaacttgaattgtaattctctcttcttcattttgtttcccttctttttcttcggaagattccgccacaaattttacaaatgtgtggatgttggaagtccccttttttcgtttttttttttatttttattttttttttcttgggttttggattttggggaagaatctctcggcggctaaatttacctccagggataataataataataataatatatatatatatatctttatttctcttttagttatttcaaagaccattattccacaaaatattactatcaccttgttagagcaaaacgaagaaagtaccaagaagaatataaaactaaaaaaaaaaaataactcataaatggtgactaaatttggaaaacttaaaaagacattatttgttaaaaaagcacattcttctaatagacgtatgtttattgctttcaacagaacatcaaagaattctatcaattttaatcaaaaaagaatatttataaaatctgttactaacctaccttcttctttttatttttattttatatagcataatataaaaataaagatacaatcccttcaatatagattacagttctgatttatcaagtgattctaatagcatagatgaaatggatgaaaaaaattacaattttcaacaaaactcaaaggaagaagaagaatcacaatactctaattatagcaaaaaaagaagaaatagaaataaaaactatgacaacagtctctttgataaaccatttattgtgcctttgcaacataatacttttcttgatatggatgataatgataatgctttatttccagaagtaaatacaatgacatatgataatgactctattttcactaaagctgatttttctacaaatgatactataaacgaagattcaatcaataacaataataataatcacaatactataaatgcaaaaaacattctaaaccacagcattccaagagaaaatttatgcattccacaaataacaaatgaaccaataccattaaaaaaaagaaaaattatcaaaattaaaaaaaccacaaatgaatctaggtttgaacaaagaaaagaacagtctttgatatcggtggatgttttgcctgaaaggtatagatgtatctttaatttttcaacatttaacaaaatgcaatcaatggcgttccaactaatctatcaaactaaatttaacgccataatatcttcacctacaggttctggtaagacggttctgtttgaattagcaattcttaatttaataataaattcaaatgaattggatcttatgaatttaaaaatattatatattgcccccacaaaatcattatgcactgaaattctaaataagtggaacagtatgcacttactggatttggagattggaatgttcacaggcgatactacttataaagaatctgaaaatatcaaaaaatccaatattatcataaccacaccagaaaaatgggacctattaactagaaaatggaatgattacagtaaattattttatttggtaaaactaatcttagtcgatgaaattcatacaatcggtgaaacgcgtggagctactttggaggtgattttaacgagaatgaatactttgtgttccaatatacgctttattgctgcaagtgctacaataccaaatataactgatatagctgaatggttgaaatcaagcgacggggaatccgcaaaaactttgacgttcagtgatgaatttcgacaagtgtccttagaaaaacatgtttacggattttccttttacaatagtaaaaacgaatttcagaaagatgcttactacaatacaaaattatgtaaaattattcttcaccattataaacaaaaaccagtcttaattttttgtccaacgagatcttctactatcagtacagccaaatatttattaagtcactttcctacagatcaattactcaagactactagtcggaatttaaagattaatgacagtgcattaagggaatgtatttataaaggcattgcatttcataatgcagggttatcattagaagatagaaatactattgagcaaaactttcggaatggtaatataaagattctgtgctctacctctaccctagctgttggagttaacctacctgcatacctagctgttattaagggaacaagtatatgggacgttcatgcaaataaagattactcaaacttggatatactacaaatgattggtagagctggaagaccgcaatttgagagagaaggttgtgcaattataattactgattcaaacaaaaaagtgcattttgaaaatctactagacggaaatgatctgttagaaagcacattaaatttaaatatgtatgaacatttatgttctgaaatatcattacaaaccataaaatcaccaactgatgcaataaattggttaaggcgtacgtttttttatgttcgttacaaaaagaatcctaaattctattggcaaatcaggaaaattgttaaccaacaaaatgatgcagattcagaattagtctctttttgtactttgttaattaacgagcttatagaagaacagctaataaatgttactgatgacacatttatttgttctccatatggacaagcaatggttagacattatattctttttgaaacaatgaaatgttttattggaatagagaaaaacctaacattaagtgacgttctaacattactggttaaaagtaaagagttcaaagagttaagaatacgacaaaatgaaaagcgcttttataaagaaataaatttatcaccgttaattagatatccttacctgacaagaaagaaacaaggacagattatagatcagacataccagaagatgtctttattaatacaatatgaattaggaggtttggagtttcctctctttgaatggtcttttaaaatccgtgcggcagttattcaagataaattattagtgttcaaacattgccaacgtttattgaaatgtatgattgatacatttattactaaaagagatggaaactctctcaaaaatgcgttatatttattaaggtgcattaatggtaatacttgggaagattcaagcggcgttgttcgtcagctaaagttaataggacttgtagctcatcggaaattggtcaatcaaagaattttaacatttcaagatatatcaaatttgagtgaagagcaacttgaatattatcttggaatacgattaggtttgggaaacaaaattaaggaagatctatcccttttaccaaacctcataattagaatgaaaccagacaaatatgaagtagtcgacgagacgtccttagacatcacatttaagatagaaatttctgctgaatacaaatctgtagtatggcatggtaaatatttatctgttgattgtgaatctatcaatcataagggaaaacttttagatttcagaagaatatttttaaaacaattaaggtcaccaaaatcctttaaacttaaaacaagggtcgactcttcggagtttactgtattgtttttactaaattgtcaagaaatagctggcattggcaaaaccattaagttttcttacgatgatatagactttaaatataaacaaatgttaaaaagcaaatcaaagtttaaatgccttgataaatgtctttttgttgaagaccaattgagtgaagatttactatctgacgatagtatactgcaatatttagatgaggaaacgaaactcagtaaggtcaataaatcaaatgactctgacaaaacacgtctatgccataacaataccactgaaccaaaagaagatagaaatatgccgtcactttctataaaatcagatatgcaaatcaatcttgcaaatccacagggcacaatcaatgcaagaaaaatgctatctaatggaaattatgaatgtaatcacttctgcaaagataaaaaacaatgtagacactattgctgtaaagatgggatacctataaaattacttaaaaatgctaaatttccaaagtattctaatacagagagcccatcaaaaacccgattttccttgcactcatcacgtgaatataaatacgatctaagcaatccagaaatagataaatttgggacatcacaaattcctaaatactacagctatgagaaagatataagttttcaccaaccttctatgaatatactgactattgaagaaatagtgatagattcagaaggggaagaaaaagaagccaataatgatgacaccgatagttggcaagacatgtcaaaatgtgataataccttactagaaccaccctattactccgataataacaagatcaaaaatagcacaaataaaaacgaaatcgatgatcaaaagttactgcctaatatatcagtacatcgcattttagaagatacggataaaaattcagaaaatgaatatagtgataaccattccagctcaatcgaagaaaatgacactattatgcaaaatttttttggatcggacgttgaaatcaattaagccaaatgtcttcaaaataaaatggaaatttaaaataaaattgtattttattttacattttttgttaaccatttcgaatattgatttcttgaaacacatcatattaaaacatgaatgatcattcaacataaaactatacgtaataatagttacaacaccagactttcttttttggaaagataaatcttgacaagagtgaatttatataatactttataatactagatgttttctaaccagaattaagaaataaaatagatatataacgtcatagacaaagacataaataaaaatgtagctggtaatatttaccttttattacattatatcataaaaaaaatttaaacagagaaacagatataagatgggactttcttaggcaccaataataccaacggataaacctttttccaatctcttttctgctaaagcagcaatgacagcagcaccagcaccagaaccatcttctgctggttttaagacaattgggtaagaagaagcttcacctttctcccagccaaaaatgtctcttaaggcttgagcagcttgttccttgaagcctgggtatctattgaaaacagaaccatcacatgcgacattaccatgggtgtaacctctcttcttgaaaacacctgcaataccacagacacttaatctggcagctctagtaccaatcaattcacagattcttctaataactttacgttctggcaacgttgttttaataccaagttccttgatcaaaatttcatcagtgtcttccaagttttcaaatggatcatcttcaattctggatgggtaggaagtgtccataatgaatggagtatttaattttgtcatatcttgatcctttaagatcaaacctttagagtgtaaatccacaatagctaatcttaaaatttcacccaagtagtaacctgaagacatcttttcgaatgtttgttgacctggtcttggtgattcattatctatttggatatcatatttagttcttggtagaatgacatgctcgttgtcgaaggaaccgtattcacaattaatggccataacaccttctggaggaatatcagctgctaatttaccttctaattttgggatatccttaacaacttcataataggcaccattgacaccagtaccaaaaatgacacccatcttagtttcaccatcagtgtataaagaggcaactaaggtacctgtggtatcgttaattaaggcaacaaccttgattggaatgttcctcttttcaatttgagccattaataatggaacaacgtcgtgaccttcaacgtttggaatatcaaaacctttagtccatgtttgtaacacaccttggttaattctatcctgagaagctggataggagaaggtgaaacccaaaggtaatggtttttcaacaccatttggatattgttcatcaacaaaattcttcaaacagtcagcaatgaaaccaaacaaatcatctctgttttgagtggttcttaattcatcaggtaatctatacttggattgagtggaatcaaaagtacggtcaccacctaatttaatcaagacgactcttaagttggtaccacctaagtcaatagccaaataatcaccagattccttaccagttggatattccataacccaaccaggaatcattggaatattaccaccttgctttgaaagacccttagctaattcatgggcaaaatgctcagaaatttgaaccaattgatcattggaaactgaaaaggcattttccaagacctctaattctctcatcaattcttgtgggacatccaacatggagccctttcttgcaggtggtttttttggacctaaatgaaccatttttcttatttcgttataaacactgatttgcttatcaaggggttaactttacgaaaaaaagacagcacaagagatatacatgagacaacgcaagctatgtaaagaatggaacgtaaaggaagaaaaaataaaaaacgggttaaggttatcttaaaaagaaactttaaggtagtggcagtaactaagagtaacacctaattgagaaaagataggaagcgagtgtcgaaaatgtacagtttttatataactgaggagacaaagtatcatgaaagcaggcaccacaaaacttccgggacataaaagcaaaaacgttcgaaaaacgaaccgttcacaattatttgtaaaagccttcagcaaaataatgggcacgtgatcctgtttgccttatttatttacttatttttttttttttattttttttttaaatactttcactcatgacaacacaaacaagcgtaatcatcatttgctttacagtgctcaacaacgaaaaaaggaaaaaggaaagaaggcaaatttcttatgattttacatattcatagtaaatccatggttcatacaattagggttttgaaagacacgtttgggaacagttaagaatttcgatagagcaacatacaatatcataatttaacgtggagaatcttcgtataatggtatgaatggacaatcgtcgtctgttacgtttttgctctattaaaaaaagaataaaaaaacaaaacacaaaacacaaaacacaaaatcttttttgtaccgatttttttttttttactaaaacagcataactttattatatcggaacaattgtattgtttttgataattcttcctttgggaaaaccctaattgaattttccgtgttctccaaaacgtcttgagggaggtttttccgtcgtgttgactgaaaagactaatgatatgtctgtttttcatttgtatcatactggcagaacaataattatcaacaataatgttgaattcgtaatagatagctccctccctcccctcttgacgtaacatacgaatcaaaatatgtttattatctgatctcatatctatagaagagatttaacaaatatcttaaactaagggatgtagtcactatgacttgttttatcacgcagaattacacacttcgtttctttgttgtgtcaatgtgtcaatattgtatttgtgttatgctcttagtcacatatatatctaaacaatatgtactagaaactggttagctttgttctaagttatagtcagcttggtttctcaaaaacaacaacaacaacaataataataataataataaacaagtaagtggtttccccaaaactttctcaacctatctacaattcagctttattaatggtacaccaaaataagtacatccaccttaggtcaatcaatccattaatacacccctatttacccatttctttttttataaaaatagtacatctttaatttgcttaaaactacacaggaaacatatttctaaaaccattatcagaaacccgcttaatataaattactattactattattgcaattgttaaattcgacattcacgtgtgttttcctaatacatattcaaaacaaatatacataaacacaagaaaagctagcagtaaacagatatatcgacattcattatttacacctgtatccctaacgcgtttacatatgaacaataatgtcccttttcttctcatccgacacaaatctaatatcataaaaaaaatatgtagataaataagaagataactaataaaaaaaaaatcaaaaacttatgtttcaccatatatacacatgtaaccatatttgaccagacttgatggaataaaagagtggaagtgatcataatgttcaatcaagtcaaaagcagaatgaaaaggtaccaaatgcaaacaacttgattccttacaacacgaattcttccatgataaaaattcgttttccacctcattaagtgaaacatattgacttctctcaggtatggtctgaatgtctgcagaaatttttgcaggagagttattcatgttcaccaaactatcattctttgtcgacaccacattgttaatgtcattgtcgttgctggagttcagattagcaggcacaactgtgttgatagagtttgagtattggggcttttctaatagcaattcagataatgaaacgacggtatttggtgtatctgttttagtgcttaaggaaggagaaggtaattgaggaactgtgtcgctttgtacgttattgtctttggtagtttcatactcctttaccggttcttcaggttcaaaaattgtctcatatatgggatcatattcttcatctccaggatatattggtgttaaaccagtaagtggactcatcacatgacattcaagcatatgatctgctaaactatggctcgattgaaattcaagtgtgcatgacgtatacggacatttcaatgctgtatttgctggcatcaagttactctgttggggtatattgtcatctaaataattatatatctgctgatcttgtgtagataattcaggtacattattgagagggggtatcttgtttgttgtttcattactctttgctatgtctggattttttaaagatatttcattaagtaaagccaataatttttctgcttcttcgaaatttttctcgttcatctgtttctcgtattgacgtcttgtcttgtttgcatgagatgtaaggtgcctttttaactgttggttagtaataaagcctttaccgcatatctgacatttgcgaggcttctcttgagagtgcgtccatttgtgaacccttaaatgacatggtctaataaaacttttcccacatccagaaacgttgcaaacatatggtctttcattggtatgtgataaaacatgttgcttcaaaagtgtagatcgcgtgtattgcttatcacatcctttcatagaacatttaaatttcttaactgtagtctttgtttcagttggtttagcaagttctgtgctttctgtcatcttaaattctgttattgtgattgttactgagttaagagcttaaaaaaaaaagcaaaaaaaaggaaccaacaggtaatacaagcgaatgtcgtttagacgtaatgattgcgtatttaagatcgatgaaagaaaatatgtataaagtaactaaagagtgatcgattctccggtaataatctgttatccactaagtcgaagtatttcctcgagatcaataacagatcgtattgtttttaaagatatagaaaagttaaatcatttttttcttttttcttttttatattgtgttgaggaaaaccctaactagccctaaaaatagagagaacacttagataataaactctacactataaaaagatcactcattcaaaaaaagaacataacaacattgctaaaacacaatcaacgtactgatataaaatatgtagatatataacttatattgcctaaacaggaactgttttacttattgataaacaacaaatatgtatttttgcattagaataaaaaatatttttagtataataaaaaaaaaagtggcattaatatgataaacatcattaaaccaactcaatgacctaattctccatggttgtttggagtcaataaaatcttaatatggatgtctttatgatttatcaattccaagaaacctttttcccaaccatcttcaatcttatgtttaccagtgattaataatttacattccttgggatctatctttttagtttcaaatgcgtggaccacttgtttaaaatcttcgacagtgtaaccaatggatccggttacattcttttcttgtaaagtaatgtccatcagattgaaatccaaacctttcccccaaatggcgatattacaatacgtacccctataatgaacagctgcaataccggcatggaaagttggttcaacaccagaacagtcaaaggcaaaatcaaatccgtttctagcgtcaggaatagaacgcagtttttcaacagctgaatcactgtgtattgatggatcaaaagtctctacatgcaacttatcagccaacattcttctaatacttgcaggttcactaaccacaattttcttagcaccttttgcttttaacactaaaatcatagccagcccaattggacctgaacccaagactagtgctgtcttgccctcttcgaacttagctactctagccccatgccatgcaacagataatggttctatcaatgcaccaacatccattggtaaaaaatcaggtaatttgaccacgtgatgttcaatagccttcattctttcagcatacccaccaccacagacaccaagacccgtgaaaccagcgtaatcacaacaattttcacatccatcttcgcaagcgtcgcattgtggagcattagcatgttttgaatttggccaacgatgcaggtcaacacatgcagcactagcctcaacaaccactctatcaccaggtttaaagttggtcactttaggaccaaccttaacgacataaccagacatttcgtgacccattgcctgtggtaatggttcatttgacaatggattgacttccccatcctttggcatgaaaattggtccatctgtatattcatgtaagtctgtaccacatacaccacaataggcgacgtcaattatcaattcatcgtctgctgtaattactggttctggcaactcttttgtgaaatgaatgtcaccttttttaaaataagcaaggcctctcataatggaattgttttaactaaaaaaaaaaaaaacagataaaagaaaacagagtattaaaaattctaaaatgactacaaagctatatagatgtatttatatattagcttgtttagtttttttcttttttttttcaatataaatatgtcttgaacataaaactgtattccaatcattatacaaatgactcatgagcggcagacttacaagacttcaagaaaaaaaaaaataaagaagaaatataaattgaacccaacccttatgtgatatatatttttcaatttccaggttttactgaatcatcatcacctgtcaaaaacaacttcaaatagtcagcatcctctgcccttccccctccctaccatcatgatcttcttcttctcgccctcaatagaactagaggcggtgctatttttcactaattaatcataacaatctagggcaatagtatttaagagtaagagtctctgtactttttatcaatgtacttgtgttcctattagggttgaccaattttctagaaagaaaaaaaggaaatattaccaagtagatgtatagtaatttttgttattaagaaggaaacccctgtctttttttcttttttttttttttcctaaaggagatatctttttgagcgaagagaaatcgggccttttcaaaatcaccccatgtttttaattttaaacggctttcagatcttgtgataataaacacaattagttgtgagaatcccattcaataaataacgaaagtaccaacataaacttatttacttgaccaaacaacaaacagtatttctcctcagtttgtacgggagccgtacccataataaacgaaagtagagtctacttaaaagccatttttcaaagtatttgtaaagctgtgaaacactttaccatactatataatttggaagagatacagcgttgtccgattcttgttaaatttagtgtattttcatgtacaaacttttatacagatatatcttgtcattttcacatatggttatgaacaaaaaaatgtaaaaagatatgcatggtaaacaaatagttactttgttgtaatgctattctttaggtataaatatatctaactgtataaatgtaacaaatatatacttcacaaaaataaattaaaactttttttccttctttcttttgactatcttactcaattatcaggtaatgattttcttggtttttttcttttttcttgttttatttcatcttcttgctttattttatcatatagacgattccatatatcaaaatacagactaagttttcttgcatctttatctgatgagtgagctgatgctaaaatcttgtctctgacatgtcttaacttttctaacgtatcatcttcgtttacccagtcattgaccttactactatctccaaaattatcttcttgttgtaatagataattatgcaataaattgtagtatttttgcaatacgggatttctgaagaatttcggggagtaacaattacgaagattgaaattgttaacaatagcttctgtcacattgaatagagcatcatcttctggagtattactgctatctgtgttagataaaactaaatttggtacttttctcatttcctctataaaaggcactcgatacaaaaagaaaccttcattaatatctctttcatctgttggctttaaaatatgaaaactgacattcgtgctatttctttgtttaccccaaaccaacgcaactttattcatcgaccgcagatttttaaacaatgatactaaaattcttgttgaaccaacatacaatttttcatctggatacacaaaatatgatttatcaacgttgttaaaataatgtatacatttttctgtggaacgaaacccaattattttcaaatatgttcctttatttccacacatttcattaaccgagtcaagttcttcttctgtcaattcaatattaatatttcctaattggaaaactttacataatttagaagggttaataatttctcctgtctttggatgaaggtattttctcgacgaaaatgcttcttcttgtatattatcatgttcatatattaatttatacttagtaccaggtttttccttagtgaaaagtgaatacgttttaactccaacttttataccaaggtcttcggatatgattagtgaacacctaaatgcaatacgttttgaatcccttgccttcagtactcgagatctaatcgcattgaaagaaattggagtcacatttggcccatcatacgttgagttcttgacccaagatccactgttcaagatatctttataaaaagcagtattaaatggtttatcttcagaatcctgaaaaaaaaaagttgttatgctgacgaattgttggtcatataaatctgctgtaatttgttttaatctatttattatactttcatcttgtgcttctacaggagaatcattatttgtaaataaaaacactctaccgaaattgtaggacttttgatcttgaaatttttgtgtgatttgttcttgaataaacataaacaagttttctaatggtgtcttagtctgtgatatttgacagaaagatggaagatcatatctattcaacctaacatcatcgactaaatttgatatctttttcatggctttaatgtttatatttcttagttgtatcaattgatatatgttattttctgaagaatctttgtctgaattatataagtaacaacctattccactctcaggtttaattattattagctgtttcattaattctagtagtgagtccagtatttcaagtaaataggatctaccagtagatcctaccggtggcttgaaaattgcatctgtcagttcaatacaaaataaaattgcctcacatgggataaatcgcttgttttgggattgttggtattcctgagacattatacctatactgttgagtccatttctaaggtgaaactatcttaaaagtgtattattttgtgaaattctttgaactgtcaaaaatatttatgtcttcctgtacaatatagaataatttttttcttgtccaaacttcaaagctaaaataaaaaaaaaaaatgaaaacacaactaaagcagaataaaaaagttaaaattttcaataatttgaagtaattatgaaagtatagcaaattttcgttcctcaaccaaacgtctttgagttaacatcattgttatgttttttttagagaaaggaaaatccttttaaaagataaacgattatctgttttactatatatacatatattaacgaggaaaatttttgtccatacagacaaataaagtatagaagcatgtagtattactcctacatcaattactatagatgaatttgtaacaacctggggagagctgttaaaaaagataaacctatcctaaataatactgttaattgtttttgtagttgacatatttccatatatgttgccactagctcagctcatcttcgatttactttatccttaccttcgaaataaaaaaaattaagaacatcatcaagtatttggttaatttagaatgattcttctcgaaaattttaatacaagttatcttgaaatcatgttgtatatcaaaaaaggaattaagttccaaaattaccagtataccataccaacctatcaaatcaatatttattttttttttcatatttgctataaactataccctaaagttgtcttctctccattattacttggacaacaaaccaattaaataaattaccgcatttatctgttacattgtgacccataaatagtcagccaaatactgcacagatttgcttttctcatcacaccccaaaacaaaagttatcattgactcctttccttctgtctttttacacagaacaccagacatgagccaatttttgccctcatggaaattatctatatgtaacaaatagtcaacatgaagccctaatactgcttttttttaattcagtgggattttgtcactgtaaacacagaaattgtcagaaaactaaacaatatcattaacattatttttgataaaccctaattacaacatttttttctaacatgcaattcgcctctagagaatgttttgtgtgaaaaataaaactataccctaaagcccttttgtctctttaaagaaagcatatgagtctgtttttccacttctgtgaaaatcccattttctattttggtagtcatggcaacagatcttctttgatgtgaaaggaaataatgagtcagaagattggtaaacacttttatccactcatggagggtaaaaatacctgaatgtgtcattataaggacattttgccaagaattacacactttttctcaattttattcccaaaattctcgtacatattcaaaaatacttgtatataaatagggatgtgatcaattttggataagaataattcttcttggatctcaacaaatgtttttttatccttcatcaaataacccaacataacaacagaaaattaaaaaataaaaagacaaagtatacataatggctcaatttggtactgagtttagaaagagatatttccctcatattcctgatgaccttattccagtaaaccatgggtcacgtgggttaacaccaaaacctatattagaatatttggatgcaatgaataaagaacatgaacttgatccggatgagttttacttaatcagagctaaggacagatacgttaatcaattaaagtcattaagtgaatttttaaaagttgattaccgtaatttgatattgataacacacgctactatggctgttaactgtgttttgagatcaatcccatgggattttaagaaggataaaatattaatccattcttctacatatcgtgcttgtgcatatagtgtagatttcctacatgataggttcaatctccaatttgatgtcgttgatatcctctaccctatggaagatgacgaaattgttcaaaaatttgaaacaaaattgagccatactaagtacaaattgtgcatgtttgacactatttgttctatgcctggtgtgaggttcccttacaaggaactaattaaagtctgtaaaaaatatgatacctggtcattaattgatggtgctcatggcgttggtttagaaaatatggatttcatatgtgaattgaaaccagatttcattacctctaacttacataagtggtttagtactccaaaatcttgtgccttcatttatgttgatcctaaacatcatagactcatgcaaacttttcctatttcttggtcttaccctctaaattcaacaaagaacaacaaagaagtggaagagaatatattgattgaaaagttttggtatgttggtaccattaattatagtgctgccttctgtattgaaaaggctattgaattccgtaaaaatatttgtggaggcgaagaaaatattcatgagtaccaaaaagagttagagaaaaaagctattgatatagtattaagagaatttggttcgggagccaaatttttggataacaatgcacacactttgaattgcattggcatgtttaatatctccttcccaaaaaatgagaaaaatactaaattcattgaaaatttatctgaatcctatgatgattatagaaaatttaagctcagatgtgaaactagaatgattaaggaggataagacatttgccccatttattgctcataacaatgaactgtgggtcagatttagcgttaatatatataatattgcctctgattacgaaaaatctgctagattagtcaaaagagtgattgacaagtgtattgaagaggagctggaatgagttgtatattctatccttctttattaaatatttaatcataatatatataaatggcattgatatatgtatgcaatattagaaatagtagctatgtaaatttatacatactcatgaccagtttgtcgtttgaataaaaaaatatttattccatgaaattattaatctaaagcattatatattcacaggatcaaatgtttttttttatttttaaatttcttcttaaggaatatatgtaattgaaattgtttatagaaaattaaacataataataaattaatataaaggcattttatatccttttgtacaatattaacttgctttttggcctacaaagttcataaaaacaatatgttttgctttaacaaaaaaaaaaaatcaatataaaataaagagtaaatataaaaatatattacattatgacttgctatgacatctgattgatattcactttatatttaaatatatctatatatagtatttaaagtaaagattatcaataaaatacttattttttttctgtaatctataataattttaattgagacattaatatttcattaaatttggttagtatgaagttcagagttatatttgactttaatcagtggtctgtaaactggtgtccacatttgttccttaacccatttgacacatttttcaaagtcacgaggaaccttgatatttttatctgtgttgtcagtacataatgtttcttcaacagtagcaataccttcatcaagggccgctaatattacagcagcagcaattcttgctgatgtatcatcaatagattcaaggcctggtaacagccctggagtagaatcaccttctgtcaacattgatgtggcagccagttgatccacagctgccgaaatcattctatcactgatacaagatgcacgagataagacggcacccaacccaatgcctggaaaagagtaacaattattgttttgggaaatacgatatccatccacaggttcaaatggagaaccagtagctactaaggcattattattggtccatttcattaaatcgtcagggaaagcttcatgtaatctggttgggttggacaatgggaacacaattggtcttgaattgtgcttatgcatttcttgaattacttctttagtaaatgcaccagcttgtgtcgaacaaccgatcaagcatatgggttttgtattggcaacaacgtccactagagactttgtattgatatctttccagtctttatctggcttggcatacacatattgttgttcagtagctatagctttatgtgattccaatatcaatccttccttgtccatcaaatagatcctagaacgggcttcttcaattggaagaccatgtgtaaccatatgagacacaatttggtcagaaataccaaggcctgcagaacctgcaccataaactagtactgtgatgtcttttaattttctatgtgtatgttttagggcagcaagtaacgaggctacaacaacagcacctgtaccttgtatatcatcattaaaacatgggacctcataacggtatttgtctaaaattcttcttgcatttttaacaccaaaatcttcaaaatgcaatatagcacctggatacaacttctttactgcggttatgaatttgtcaataaaacaatcatattgttcaccacgtaccctcgaaaacttgttacctagatataactcatcattagacaatttcttattatttgtacctacatctaagcaaacgggtaagacacgacctggatgaatcccaccacatacagtcatcaaagctattttagagacggagatacgaacgccaccgacaccttgatcaccaattcccaaaataccttcagaatctgacacaacaatataatcaatgtctttagctttaccaccataactttgcagtctttcttcaatggaagcagggtcattaatatccaaaaaaacaccttcgggtttattaaatctttcagaatatgaagcaatagcatcaccttctgttggggtgtatataattgggactaattctaaaatatgttttttaattagagcaaaataaagagtcttgttagtaactcttaaattggtcatatagtcatttttgctaatagcagtctttaatttactcaattgcaaataagctctttccaattgttcatccagagtttctacttgtggtggcagtaagccatttaaattaaagtcggctctctcttgctcagtaaaagcagtacctttattgaaaagaggagagttcaataataaaggaccatacaagggacattcaataggaccgtttacacacaaagcatctacttgagattccaccccttgagctaagtatgaaatagatttttccatatcactagaaccagccttgacctggttcttcaaatattgacttgtgcttgtttctggatccaacgaagtagtttgcacactaagcattatatatatatgtttgttccaataatgttcaatattgcgtttgacaatgtgtgtaggaacgatgaacaacccaataagcgaaagatagaatgtgtataaaaatccttaattgaatgttcaatatgaaagtcatagagtgcttgaatatatcgataaaactcgaaacataatgcattcaataaaaaaaaagttgtatatatatatatatatatattattattacattttgactcggtcagcgttgatttaaatcattttttatactgaactgtatttttaataaagtatcaatttaccctattgagaaaacaacatattattagataaaaaataaacaataattattagttaatgaaagactctatatctttttattattcctttataaattaataattgtttctgtgattatgtctgcttaatttgatgcttaatttttgtcacatttgtcatcccgatttgctccgaagctttattatggaattaaactgtttatcttttgttttttttcctcgatgaatgataatgtcaccattttttgtggaaaagcaaaataacaagaaaattcatattactaggtctcttcatcgtcctttttcatcaatgatttcagaagggacaaaaacaataaatagagggattatttagcagggcaattaatctatatgcccacccttcgttgggtcagttacaatttaattgtgaactatggataaagtatcaaacaaaaaggaaggacaagttccgtgatgcagtttgtttatcgagtatcttccccgttttctcggtcaaggaagatttggaaataaaaacaaaaaaagaaaaagagaaaaggaaaaaaatagctaaggaaaaaaaatgaaagaaaaaaagacaatagattctgaaagatttttctaagatcagttttgcaatttcatagtcaccaaaaaagctgagatttaaaacaatgtgcgatgcagtacaatacaaagctagtttggcgtgttcttgattaaaaaaaacatccataaatttttttgtaattggatacgatgttgaatgctgtcaatatgagattctatggatgaaaacaacaaaaaagattgagaaatagaagacaaaaaaaatggttttcacagggacaagtaacctcaatttgattccctgtaactattttaattgctctgtaatagaggagataaattggtaacactgtctaacttggttaatactgaacaagatgcaccgtctaaagtagtcgatatatacagcagctatctattgaaacaatatggactacacatatcagacaagaactattggattatatatattatttactgtcttgtagaaaaaaaaatcatattatgttattcattcttattcaatatgaaaacgtagcaactggatatgttacaataaatgtggaaacaaaacgaaaacttaaatctcttattgcttttagtttggatattttatttcattcataattgcattcaaaaaaaaaaaaaaaagaaaacaaataaataataagtattagttttacttatttttattttttttaaacagcagtgcataactattatagatagtaaaaaagtatcagagaatattataaaacaaaagtaacataataatattattgtttgccatttaaaaaaaaattatgtaatctagtatcaatagcagataaattatatttgggaaaataatctcatacaacaagatcaatgtttaatactgtcggtgaccgttcaaaatcatcgtaacacagaacctcatttaagagaaagttattctgctcttgtggcttgctagattttactatattttcatcatgcattcttctgtatacttcatatactgagaaagtaagctaataataagcctttaaggtacataactcctcaatacaaatttttatactttctaagagtaatatagttcataaaagatttttcaaaaagaaaaacattttaaagaggagaataaaaattataaaagattgatatgtacttattcatatacagattataccgatgtatgtattacttatccataattttaaaaaattagggatcaggtggcctactgtttaattcgtcaacaagaaatattttaattttctactttccaagagggaaggttaatattaagctttaaaagtataccaccccattaatacctacttagaacagagcttaagagaagattgtcattaaagtctaaataagaaatgatacgctaacaattataatagcaatgtagcattttttatttggcagactgattaaatgtatttctatcacatatttcaaagtaactaccaaaagaagcaggattttgaaacaactagtttacttgttcttattaaaactctacacctaccccactttagctgtattgttcatgtcaacatctctagaatctacatcacgatatgcaaccatattaccaatataggaatctactgcactccagatgtcattcaaattatatcaaatagttaaataatgttcaagatgtacagaacaatacttatatttgaaacttccagctgaatcatattcataatttacattgtaccaatttcttttttattctattgtattctgtgaaatagtgtctctccttataaatgatagtttaatttcattatttaactcatctgaagatatattcaatctataaataagaatgtcatttatggtagtaataacattatgcagggggaattttgtatgatcttatttatataatttatcagcttcattgaaaataagttcaaaaaaactatcaagaaaattggaaaggtaatgatttcaatgactctttgtctctatttataaatattgtagtaagctagacatatgtatagatagaataagatatagtaacgctagtaataacatgatttaatccactatcacaaccttcttcattcggtggacagccagtacaataggcagtcaattttctccatttagcagcagcactgtaagtagtagctattagtgaacaaaggatttgcaaccatattcttctttgtaaaaaagaacctcccttatcaagaaatcaaatatcacagttgcctttagaaaaattataaatagataattcataaataacaaaatattgtagtaaaaaagaactgtttttttgtaaataattttgaactaaaatgttgtttgttattataaaatttccaagtgaacattttctattaatttgaatgggagagccattatatctttagtcataatagtttcgctcaatagagtgcactaaattctaataaataatgttgctatttccaacaaacaataaaatttatgattttgtttaatgttaatattgttatgaatatcaatagaatatctagtgtatgaagaaatgcgtaatatattggatcagagacaactcaaactagaaagtaggggattatgaattagtattaatatcgaatttgattttataaccgatcatatataacatcattagggctagagattgcaataaacttgaaagacccaagtaaatggtactatattttttcctgataatggcatgttctactctgccaatcaaaatcatggtatgaaaacagtcgtaggaaaattaatgttcaaactactaaatgtagtctgagaaattttttgtctcagttgtaaacaaaatctcagaaaaatagaacattctatttttctagatcttgctccaggggaagcatctcaaaacggaacaaaaaaatacagatgcacgatttgttaataaaaaattctgcaacccgtagattttttcgaactttttctgtcaaacaaaaggtttatctttaaaaaagtgcaaatcttaacagttatttactttagattggattataatttcctttccatttaagaattctatctgctggcgctgacagatgtgatgtgaggtatacatattcctagtataatgatatgattaatacattctcaattaaaaaaaaaaataaaagcattgtgtatgaagtaagaaaaggataacagaaagtgattttgatatgttagccatggtaattaataatttggtagatcttgtgaaggaaatttgaaacggcataaaagaaaacagggaattgacaaaacagactctggataatggatgtcgtttacataaaggaaaaagagacaaagagggaaagcttttggaagaaggaaccaatactgaacaaattgtatttgagaaagaatttaatgcagattaaagagtagaatatggtatgacaagacaggaaaagatacatagatgatatcaacaataaataaaagccaaaattttgtaagggtttttatcgaagaaggtatccatccatctttagtattggatcccatatgaaacttctacttaaactataaaagttagttttatgcagcgtattaaattaaatatacaataattaaatatcgatgagtatttctaccagttacctcaataaatcaaaggtctttttgaataaaaaataaaataactttccctacttggattatccaacaactattatcaccattgttacccatttaatgcattttcttgactgaatcaatccccttgagtcatcatgttttagaacacctaaatatagaaaatgcatatttataatttagtaaatagggacacgcaaccaatatataaaatctgatacatgtagcacaacaaaatagtagcgagacttttgaatggtaaataattactaaatattttaaactttggtgaacaaaagttcatatattctgtttattaaaaaaataaattaagagtttgaaagagttatattaacataacgtcaaaagctttttttcacacaaagatagatttttaaaaatagcgaaaccgtaattcttttttgtcatctgtttgtattttatcaaaagccatacctcgttttcctacgaatcaagagattgttataatgtttttagatacttatttactagctgctattttgcttattgttgttcttccttcatacattctatacaggattttaccaaaatctgttgcattgattgtcattgatatttactgttatatgtctgcaaaggcttttgtcgaatcagattggtccaaataaaattgattctaatgctgctaacacaataagtttctagttgactagatcaacattcttggaaagtagtagattttatatttaacattttcaataacctaactaactagtaaattggatctttggtttattcagaacctatataggtaatatatataactatatattttgtttacgaataaatacaagttgatctttcattatttttgttctctttctagaatatttttctccttgaaaattactaactctataataagtaacagtcattaataaagaagcatggtgagaatattatccatttatgaataagataacatttgtctttattttaatttcttcaactttattttttacttaagtaatatcaattcataatttttgtgatgaattgccagagcaatttttaactaaattatctcttggtagttttaaaaaacaagttaattgcaatagtatcatttaacatgcatattgatacaaggattttttcatactttatgtaatatttgaattattattccaatttctaaatagtaaattgattgtattgtcagttcctttcttttcttactctaaactgattgtttttaccctattttttaaatctttctttttattgctgatatacataaactttgttgcatagttctttttaatgagatacttttaagctatctattatatcatgtaggaaacaaagatataaagaaaatggattagttttgattaaatagccgtatcaatatacctggagcttcttaaggtaataataatagatatttagtcgaattaaaaattacacattttgtccacttgaagaatgttacttttaagaaacaaggtttttgtaaactttcaaaataactcttgaccatctgtacgaaaactacctgctagtgactaacatgatacttagtgagagaacttttgtacttcttaatgcattgtaattgtatattctttacattagcttaccaccttgaaagatgttattgagattaaatagattttgttacatgttcaagaatatcagagaatgatttacttgtgttgctaatttccaacctgataaaaaaatgatattatcttattaatattgaaagaatagcaatagtaattgctctaaattttacaccatactctctttttccaagtttaatcttgaaaaataaatcttcacttttttgtcataattgtatttgtattattactatatatgttactcagttcagtatatttgattactttgagagcaaatgttgtatgaaatttatatatttatctcctgttctttcaatataagacatatatatagctagaattattaattagatcctccatattacatattctctatatgcaataatagatgtgatactatggtttattctatattacaccaaaatattttagttcattcttattctataaatacaaatattattaatgcgaaacagtagtgtctgtatgcatttaatgtgtagattacattctcaaatgtattcaaaaatgattagattaacaccgctaacatattcaaaaaacacctgattataggggtgttgtgacggaagtgattattggcacgaatattcttatcagttatccatcagattctaactaaatgatgtttcaatagtaatagtatgctatatatttaatttaataattaataaaaacaacttaataaaatgtaagttcatgtataatatcagtacagactttataacatattaaatgagatactgttgaaaaaagtttagagatatctctatcaaaataatttcaccatactaaataactgaaaagattgaaaaaaattacatcaatgaagactcaggtataaattaaaagaactaagaaatatgggttgatactaaaatatctctgacattctactaaaattgaatgtctcataataaatagataggtcaattagattttagcaaatacaaatctctattaaaataaagagcctttattgcttacttattaataaatttaaccaagataaattgataaaaaaattgtcacctataaaagagaaaagctaaatataaatatatataaaatcaatagttttttcatatcatgtctttatcctttatatgctttttatatattgtaccacagaagaaaatagaagtagtttactataactttctacactgtaagtgtatactagttataattaagattgtatactacatattaaatatgtaagaacgttaacccttaataccagaactttatttgtatgaaaaagaactttaaaaactatcaaaaatcaactcttttttacattttgattctattagtgtttttgtataaaatctcatgccaaataatcttatttttaccctttttggaacatatctaagacttgcaaataattattttgttacattgaataagaaaatttccataacttgatatataaataatcaaaatacattcttgaaaaaaatcgaatttcaaaactttcttaacctctttttctatcccatttcttcttcagcattaagaaaactttaatgaaaatacttcaacaaatttcaacgttttcatttccttagacaacaaaaaattatgatctcttcgttattaatttttgaatattacttgctcaattattgtataataacggagaagatgaatatcatttaatttgtaacattatgaccactattctattactgttttttttttttcaaagaatttaattatctaaactaaatttattatttattaatatgtaactcctattttcttacttcctcatatgatatagaataataataaccttaaatcaattgataaaaaaccactgctctaacatcggacaactagtaacagatttaccaaatatttccaaagaaactgagaatttgacaatgaaccttacactctattaaaaattaccaatattgaaaagttggccaacagtagtggtgaatctagggaaattactgataatagtgaccttttagataagacatcaaagaaaatgagtttgttaagtttaattttattgataaataaaaattctcacaacaaattttcaacaattccaaatcatacttatgaattattaataggggattaagttttgtagaaatagatgcataaaatacaaacatgccatctcctagcttacagattagctacactgactggttttgatagcacaaatagaaatgggaaaacagtgaaaaaaaacactcacaattgcctaacttttatttttcgcgagataactgttgttatggatattttatgtacttgttgtaatataccagaagaaagagcttgtttgtttatttgaactattaccttttcagaaatataatgttttcattcaatacattatgtgttccacatgcaacaatagttttattataacagtttttcttattaactctagttagaatatttctatgtaaacttgtgcagaaatagttaattatgaatggaagtatctattaaaaaaataatgcaggctcattatacttaacgtaacaataatggtctaaccctattaaactatttctttactatgccttttgattagattcttcttattttcaagagcatctaaacgagaaacacagaaaaatttttacaagtaagagaaactaagaaaaaaataaaaaatgcaatattcacacccctacactatgctttcataaatatagaattgttgactttaacgtttaaaaaagaattattatacttaaaagttatctggtgatattctgcacatacaataaagcaaaagatatattttaaattttcagaactgaactgtcattttttgtactattattattaaacaattaaattcctatacagtcagctgatatgtaaaaggtaacaattaattttccagatctccactcaaaaaaaaattttaatacaacaatggtgttttctataatatgtgcaagtgcttgaactattgttcaatatttcctttttaggtgtcaaaatggtgggaaaaatcccatcttgtattttcttaattttcataaaaaaaaagaaaaaaaaaccacaaaccttgcccttctatacaaagcacaaaagaaaatgacatagtttaaagacctgtcaattatgaagtctctaaactttataaggcaaaacttaaataaacagaatatgttaagaacacacaaggcacattaatttgaaatgaaataactaattatgccaaattcttaaatgcacattgtcatttgttgctgagatgatcgatttttgataatatcaacacactataagtattttgtgtttcttagtggagtatgtacctgtcataacttagtaccttatgtataaagtagtaaagatacattctcaatttgaaaactctatttcagcaatttcattgggtgaagtgccactttttatgtttaagataggcaactagttcaagacagacaattgaatagtgagaatataactatacatgttttgtatttacctttagtagtaaaacataggtaagagatatattcattgagtattcttatccactattattgaaaataataattaaaacatacaagcaagatacatccatacttccagatcatgttccgctccacaacaaatagaacattaaatgactatgttttaagaaaaaacaaaaagaaaaactcttgatctttttgtaaaccctacaagaatagaaaacaatagtatatgcagatcttttacatcacactgacatcagcctggaatggtcgaaatgtacatgcatgatacacacccacacatatacattcagcataaggacttggatcttactaaatgctccagcctcatttttggtaatttctttaatgattaattgtcatatatattttacaaaagacacatatataaatgtgggtctatatctatttgtatacagtctgcaaattgattcttgttttcattctctttatttctggtttcttgttttctgtgtcattcttgctctcctgagtgttttcctaaaatgtccacaaacaaaaaccaacaaagaaaagaaaaaaatagctggataagattatataacataaaaaaatattagtaaccattattcctttgttattgttaaaatgcagacattaatcttgtggtcactattaggattacttgtgaccaaagtaagtgccgctattacaactatttcattaccaacaaccttgtctggtgatcaaacattttccgatgatatcgtaattgaatcaggtgctactcttgcattagtatctggttcttcatattccttcaatggcaatattgatgttaaaggttctttagacattattggtgattcaacaaacgggttaactagtctacaatttggttctactacaacaattacaaacagtggtaacatcaacatcgaaaatattaaatcggcaggttctgccagtgattttgttattgcacctgcaagtattgataactctggtacattcactgtctcgcaattaaatgctgctgctactgtgccaggtactaatttcactatagctccaacaggttccttcattaacacaggtactattgattttgacacagctgataaaggtggcaccacaaatgggtttttgtaccttggtactatgacaaataatggtatcatcaattctggtggattatctgcattgctagccgaccaaagagcgtatcaacgtagtagatacgatatgaaaggtattgtcttcaataatcctatagaaggtgaaggtgaagtcaccggtaatactggggctgtaatttttcttaacacagaagttattggagaacaaacttttaatgtccacaatggtatgtatattattaatccaaaagttgtaccaggttcctttaaagttgtgaattttatcggatcagaattcgtttttttaaatatagactttaacaaatggtatgctgaggatttgggcaccataccttactaccttcagactaattttgcagtagatggtcaccgttactggtttaactcaagttgtacaaatgattatgctgaatatgctcaaggtaatattattgttacaccatctgatcctctttaccaattttatggtactgatatatacatgatggatatcataggttctcaatgtccatggttatctgaaccaattacaaagacaacaattgttactactatagattctattaccgaggctaccactctttcaactttagtaacctctacaattaaccagtacttcattactgtgtctgaaaagatttatcaagttgcagtacctccactatctaccacctacactactactactgctgatatttctgctccaacaacatctacttacactactacagttgttgatagcaatggctctttatctccagaagttgttgttgtagtggtcaccccatctccatctaccacctacaccactaccacaggcccggtttctgccccaaccacaaccacctacacaaccactattactgacagcaatggctcttcatctccagaagttgttgttgttgtgattactccatctccatctaccacctacactactactactgcggatatttctaccccaactacaactacttacaccactactatcacagacagtaacggctctccatctccagaagttgttgttgttgtgattactccatctccatctaccacctacactactactactgcagatatttctgctccaactacaaccacctacataaccactattactgacagcaatggctcttcatctccagaagttgttgttgtagtggtcaccccatcaccatcaacctcctacactactactactgctgatatttctgctccaacaacatctacttacactactacagttgttgatagcaatggctctttatctccagaagttgttgttgtagtggtcaccccatcaccatcgacctcctacactactactactgcggatatttctaccccaactacaactacttacaccactactatcacagacagtaacggctcttcatctccagaagttgttgttgttgtgattactccatctccatctaccacctacactactactactgctgatatttctgctccaactacaaccacctacataactactatcacagacagtaacggctcttcatccccagaggttgttgttgttgtgattactccatctccatctaccacctacactactactactgctgatatttctgctccaaccacaaccacctacacaaccactattactgatagcaatggctcttcatctccagaggttgttgttgtagtgattactccatcaccatcgacctcctacactactaccaccgttccagtttctgctccaactacaaccacctacataaccactattactgacagcaatggctcttcctctccagaggttgttgttgttgtgatcaccccatctcctagtggcccaactatctacaccactactactgcggatgtttctgctccaactacagccacctacacaaccactgttactgatagcaatggctcttcatctccagaggttgttgtggtggtgattacaccatctccaagtggtccaactatctacaccactactactgcagatatttcttctccaatcacaactacttacacaaccactgttactgacagcaacggttcttcatctccagaggttgttgttgttgtggtcaccccatccccatctaccacctacactactaccaccattccagtttctgccccaaccacaaccacctacacaaccactgttactgatagcaatggctcttcctctccagaggttgttgttgttgtgatcaccccatctcctagtggcccaactatctacaccactactactgcggatgtttctgctccaactacagccacctacacaaccactgttactgatagcaatggctcttcctctccagaggttgttgttgttgtgatcaccccatctcctagtggcccaactatctacaccactactactgcggatgtttctgctccaactacagccacctacacaaccactgttactgatagcaatggctcttcctctccagaggttgttgttgttgtaatcaccccatctccaagtggcccaactatctacaccactactactgcgaatgtctctgccttgaccacatctaccttcaccaccactattactaacagcaatggctcttcctctccagaggttgttgttgttgtgatcactccagctccatctaccttatccactactaccactggtgcagtcactgtcccaatcacatctacctacacaactgtagtcactgacagtaatggctcttcctctactgaagttgttgttgttataatcacaccatctccatttagtagctttatgacatcaccaatttctgtaccatctcctctctatggaaactccactatatctggtgaaaagattgaatctactttgagtggcactctagttgttctgactacggttgttaatggagttactatgactacaacttattgtccagaaccatctgcaacttctgaaacaagtatgactgctatcattggacatagttctattgaatctgtttattcaaagaaccaacaagaagagaccaactcactttctgctgcttccaacgcaactccagttatttctgttacttctactacccctggtccagcatttaccaatggtaaaaatcacccaacatctagaaactctagaacatctaccactgtaatcggtaataatgagtctagaagatcagaaacatcgatgccttcaatggtgccacaagtttcccaatatattcctgaacagccatcctcatcatcaattgctatcacagtacctcatgaaggtgtaccttctcttgtatcatatgaaggtaaaggtagcaccatgtatatgatgaagtggagtgttgcccattgcattggtttattattattcatggtaatttaaattgattaaaggcaaaaaattttaaaataaagaattctaaataatttaataattaaatatttctatataagtatatagtattctaatattttttatattgtgtatttttattatttatttgattttcaaatatcttatacagcacaaatagatttactcattcctaataaaccgataatatcttctcccaattttaagtaatttaaattattcaatacaattatacaatctaatagttgctatatagacattttaatacatgtatgtttttgctacatgttttggcaatttttaataaagagattgtgattaggaaatttacttctgtataaatcgattgatcatggtttaaaggatgtaaggtctttaaatcttttctaattaagaaaaattgtaattgtgaagatttgatgctagtttaattcaaagatcataataaaaggtttgacacatgtcttaaaaacagttacaatctttctttacctgtatttactgaaaagttaactagacaaatgtatttattcccacattccttaattattttctttctgtcctctgtatatacaaatacatccatagggaacatataatacatacatatatacatggatgtacactaattaaataccactgtatcttgctaagtcaaataactatatatatgtatatttgtgttaatatggtcactgttattaactcgcttaaacttatggttatacttctatttctttcttttttgtaatataatattcaattgtacgtaagctaacatatccaataactattgtactcacatgaacagtagagacatactatagaattactctaacaatatttgaagaaatggagattccttttaggtagcaaaggaaaaaagggaaagaaagagaaataacatgctatttcccaaatgcagagaattgcacactgatgatatattatacttactctacatgttaagaatattatacacaaaaatgtagatacacagaatttcgtaatgtaccttcttttgaaaacatatgatatctctttttgtcttttactggatgtagaactttcaagatttacaagatacaggagaatgtcccctctatatgtgaaagatattgtaataataataataataataattatccaaggattccgataatgtgaaaattttctttttaaataaggaacatgtaaaactatcataacacagtcgtatttttgcaaatgttaattcataaatatagtatgtcttgttattttaatgttataatggaattaaattcttattttttttttttttgaatttcaataacttctcatcattctttgttgcagttagagatccatatacagtattagacatccagtcataataatgtcagactaattcttaaagaaagtagattttctgaatagtaaattgaaagattaacatgttaatactccaccatagtatattcttaaatgttgttcaatgttcaaagatcgagataaaatctctttttattacgttatttttcaaacattaaaataagatcatctgaataaaagacacaacaaaaattattgaacagggaaagtagtacagtagaatgaaataaagatataatcaaaatattattcattatatcaaatcaatttgtcttttatcattattaccataagcattgaaaatcaaccataaatcaaatccatgtataatagattggaattagtaaggataaatatcctgtaagatatgagtaaaaagatgatatagtaaatttgtttatggatatagcataattgtatttatgtttataacagttatcattatgtgttaatttcaaaagagtattgcatatgatcataaattattataacactatcattcgatggataatgaagtgatatagaagatataattatatttttcatattgaaaatattagtaagggatagtgttcatgtgttattggagaattcttaaatagtcatatttattatgaaagtagtagtataacagtaaatgaaagtggtatttaataaatagtttccctagttacaatatatgtatggagtaagttcttttgagaatattctctatagctacttatgaatgattattaagtatacagtggtgtaactataccatcttaaatagtggtttagcaatgttcaaagttataccatatagtaagcatatcgtaactgtttatttatggttatatggatctgtattttatatggttgtcgatgagtgtggctattattgttgttaatttttttttcgaactattttttcaaattttgaaaaaaggaaaattgacaattgaaatttgaatgaaatgagattggtggataatgaagagatcatgatagctgatgctaagagtaattaagtgtgatgtgtttgtgtagtatcattcttgtctaagacgtaatatcaagagaagttgtatattaacaaagagttcatagtttaagagtgataccatacaatctaccagttattaatgtctaaatgaagtaagcagtttaagaataaaaacataattgaaagtaatagtggttgatatgaacttagtctactatgtataaatccatagtaaagatacatgttaatatcatgatagcagatactgtgaataacattgaatgttataggtttaaaagagcaataaaatttactagatgatatcactataataaacataaaaatgtgaccgtaaatataagatgtgatagagtaaccattgatgaatcagattaatccagtgtattatgtttatgttgtttacattgtttctatatcttacacatgaaaagagaatggtcaaaattcattgacttatttatcacaaaataaataactctatcgttgttatttttattcattcgaaaattgtggttcactcatattttgtaatttaaagaaagagatagtgatatatatgtttcagaaactttttagaaagagctcattgctttgtttaccttggtatagttggtggattaaatataaattgttcatataatcatttgacatgggaaataatttttgctctactcatgggaaaagatatcttggacagtttttagagaattatgagaaatattctatgcctaataatacaaaattattttccagaaaacaagatcgattcaaaaacaatctacatgttctatatgcagtgaaagccacaaatttgaaaaatctgcttacgtttttcatttcaaagaagactttgataaatagatttatgttaaacactataccatctttctactgtttatgatcaagcatttatcctatgaaaatatttaaaatgatatttaatttaaataatcttaattgtttatggaaatatagttttgtagatttaacatttgggattagagtcttagggatgctaatatggtatctcctgaactatagtagacttaaagtctaacgttgttatgttttaagtatttagtaaattggatttctcgtttattgaaaacccatgcaaatagtatatattgtatttattattaaatacatattgatctttcacaactttacttctttcaaaaaaattaccaacgatctaccaaaatcagtttttaacaaaaaagatcttgtgaacatacgatatattgtctaattatattatattggactcaactatatcataatccaatgttgataattatccctacgatctatcaaactggatcaaagacctctttaagtgagctttgatataaaatttcctacgtggattatttgataatcgactacaaaaactcacacattctaatttgtattattgacaacatcatttctcttatctcatcatgtttcagaacatcacacgcgaggattaaatagttacaacttaataaataagtactcataatgaacctttagagcctagcataatttttccatatttgtaagttagacaatcaacaaatattattattgttgtttatttattaaaacaggtctcttagcactgtggtttgaaatataaataaagatcacttctctggagaacttgtaacaactctttatttatatataattacaactgtagatatttataagtttttgtaatgttttgggtcgatcttctcatcacaagattgtatattaaggtattcatgaaatcggatatcttgcttcaatactatttacaaaacgtgaggaattaatactagctaaatagatataaacagaatataaacaacaccctaatacttttgattctcaaaaaacttgtgttttaacaacaatacagccaaaacagcataaattaacatattcaagacctcaagaactataaatatacgaaggattgatatgacattttccaaactttcatgatgattaaaccaaatgcaagaatattattgataaagtattgtcaaaaaaacataaaagaaaaatcaaatattccccatcataccactttaaaagtgttcttagaaacaattcaaaaaacaaataaatacaacagtaatataatcatagattcataaaaacgaataggttctttctgttttgtcttatccttgtagaaaaaaaagattgataaaatgattatctaatggttgctattttgtttattgacgtctaatacaagattttacaaaatatattatcgattgtcacgcgtctgcaaatactttcatgtaatagaacttatcctaatgttaacgtaataattttgttgttaataagatccatagggatataagtaatttataagatgatgtattgtcgtgataatgaaatacattcacagatatctttatacattcatgttggggatgatatccgaaggtaattcttactatagaataagaccagcaacaacaagttaaaaactatatctgagtataagtaagagtgtttgtataactaatacagaaattatatcaattacagaaaatgaattctttgacaattacccatatacaattcatatttttattctcaagagtactatggtatagttcatttgaaaaagttatgacaactactgttctagaaaattaactgtcagaatgcaatgatctttccaaactcaaaaataagagagaaggaaatactttcagaaatagttttgtggattgtgatttctttgaataatagtaatagtcatagcatatgaataatcattctgtaaattcatagttgcctctcccacacctcacattaacaatatatattttattacagtatattaaagttgttaagaattggtgctcatagtcattggataaataatgaacgttctcaatactgtaattggataaatatatattacaaaattgtattaaagttcttccatcttcttctgtatgtataacacagaaatgataatatgtgaaaagtatgcgggaaaagaaacacgatttgaaaaaatgttgtctttgtgtatgttaaattttgttacttctcttctatgaatggcaaaaatcaagcaagcagtattattaacattttgtgacatgtaagcaacagttcctcagcattccagtggtgtcatatgttggaatctcattgttccatttgtttcattctcaaatattctatttcgacgacataataaaagtaacagtataacacagaaattgttaacattcaacaacaaataatggagttataaaaccacaataatttaactgaacattaataaataatccatatatactaacataatgaaagtttaataaactagcgtagcaaagaacactttagataaacttctatccagagaaattgaaatgctaatgtacttcatttaatagttgaactatgataatatctaagaaggtatattgatattttaaaaacacaacatatattatcacactatgaatatataccaattcatgttagaaataaaatataccactgcatattgaaatccggttttctatctaatgaaagttccaacatcactatttagagataattactacaaatactctcttctccttttcttctcttaatctacttttcatctcatcgttgatggaaaaactgctgcagcaaaaaaattctgtgatgacatcgagaaaaaatatttaaaaatttgaaaaaatacaaagcacgtaactgtgttttgactagtatatttctttgtgagtgttaagtaactagtttaaacaatgaatgctacgattagaatatatttcatgttatatctgctagatttctccagtgtggttcactctatactttcccactagccttttgaaaatattttctgtttatttactgtacactagaaagaacgagtatacaagaacactaattataacacttcaagaatgacactgccaatttaaaagtatattagaatatcaatcatccaaggattgaagaataacccggagtaatgactaatgtgcatacaatttgaacaaatacaagcaacgatatttaataaatatattttattgtagttaggttaagtcatataaatactatttctagagactgtatttttgtgatattgcataacaaatatacaagaagtaactaatgtgatgttcctaattgcatattccatttgatggacactatatagggttcttactggttcaaccaatcaaaaagcaaagttgtactagatgaccatattgtaatagaactagttagaatattcacaagtacataccacatgaactatttgaaatattgtgtgttatttttattgagctgagtgggttgcataccttcttagataccatacttatattgtattgaaaaacattaagatataagacagctgacaaatataatagtggtattctataataactacttttttattgtggaaatttcattctaatatataacaatagaagtaacatagaatataaggtataatgaaggcgtgatactttacaaagattagtaaaaaagtatggaaatgtaatgatgtatcagtggtgagaagatacgtttatccaaaggttataatattattatgaataataaacacagaataagttatatgaaacaattattcgaagaagagataatgtaatatatctgaatttcacgaagcaaacagatggatgtgaaaaaatagtagtttggtaaagttgatatttcattgtcatgataactcttgaaagagagtaagaatatatatgttgaaatacaatggtaagaaaagagaacttctaagaattaaataacaaacaaatgaccaatataaaaggggtattaagatgttataagaaatgataaaataggataaataaagtgatactgttagaataagaaattgattggtaaaagaattaataacagtgtgctaatggagatcactgtctatttataaataaaaacaagatttaaccatgaaatttttgaacaatattagattctcgtgatcatgctttttgaattttattgaactaatttaaagaggaaatacatatagaataggattagatgtaacatagttgagtatattgtattttgttgatgtgcaggaattagtaaatgaaagtgattgttgattgcgaatgcacatgctaattatttccatatgatataaaaagatattactatgcaaatagtatatcaaaaaacaaaacaagatcataattcaacaactgtatggataagaatgattgtatattgctagattgtgataaagattaaatcatataaacaaataaagaattataaaggtgttgaagcattttcattgtcaattaaatttggagataatatactggcaaaaaatacggtaacctaagtaagtatgtattgttgtgtgttcttgttgctagaatcatattactcttgtgtttcttgagatgatatttcagaacttgtaaaatattattattaaaaaatgaaaaaagaagtggactataaaactatgaggaagtaaaaataactgcaggagtggtagttgcttaataagtgcttgttaatagaatgaaacaaatgtggttgatatattgcagatgttgtgatttagtttgacacaacagatctgtaatatgaagtagagtgtaaggagattacattcttgatattgtgataggcgtgaacactaaatgatacttgtatataacgagaaatgatgatatatcaatatgtgatattgaaattgtactgtatattcttaaaaattaatatttaatggataatggtaatgagagagacaaatatatgtggttatatgtgagatcagtaataaaaagaatgttttagagtgtactgttgagatagtatttccagtaagtgtgaagtggaaatggacattcaaaagtaattatataccaaggtgtacatatatttaaataacactactgtgttgtcagtagtatcttatgtatataatctagtattagtagtctgcttcatacgatatattattcttcacacacatggatcctcatactattttatgaacatatcaatactatcaattgatatatacagctccttatatcataatttattaactgtctttataatatatcttaattaaataacagtacttactaaatatactataccatatggaaatataggtctatctaagctgttattttatatattattatggtatatattaatacaaatgaacatataataagtatattgattaatatcccccattgaatatttattataatatataaaagatatatatatacatagagttgaatattataaataggaattaggggataaactaccaggtaagctaacaacttttaagtctgaagtaagttgattcgataatatatatataataattaaagagaagacgtgcagagaatattattcaatcctaacacagctgtattttagctagttaaagtttgatttagttattactattccatatagagaatacttctaatgctagaatttcatgaagaaactaaataatagagaaaaatgaactatcttttacccaccatcatctcactatttatacctcatataaagtgacttgtccgttctacttaatgattaagaaaatgtataatataattgaccttgttattattttgataggccctttatatggatttctatgattcattaacataaagtatatattatcattaaatacaacatacgtttatatataattatttttacaataattttaataaacatataaatatccttgacatgtttaatacttgtaaagatataaattattatatacaataagtaagttgaaatgcttgtccaaagaaagatcgctaatgttaggtatgagtaaatatgattgttagatcacgttgaaactcaactactgttaataagtttaagcactagaactgtcacaacatatacaattttccatatcatttcgttacgactaacagatggagagtacttaatgatgtaatttgtgatggtattatcagttagtgaacaagaagatacaaaattgaacctgaagaaataataaatatatgctaaaattctagtaatttgtatagtttattaagttttatggtataagtattttatatatgtataaaaatagtttagtattatttatattgcataacacagcattgcttaatatcaaaatatgatacttgatcagacataaaataaattgctattatagggatatactctgtagaagtataataatttattatatgtacaatgaaagcatatagagatgtagttaataaacacctatatgatattagtatggaagaatcaacacgtgatagtatagcatttgttttttaatagataaatttaagattggaatatttaatattatattgatattcatactatgcaagaatcggtttaaaataagtattaaaaactttcaatattatatgaagatataataaaagctaataaaaacaaatattatagaaatagatgataatagtatgtgagaattagtataataattattactgaatattgtagggatgcaatgggattatattgaataagaaaaactatagtgttttacaaagtagttaacataactcaggcagcatttttaatagaagaacaatgatcttctattacgtcattcgtattcacatatctgtgataaactacttggaaatataaaccttgttgtggtttcacttcaaagtatgttggaagagctgttgggaaatggcgttaatagtagatagaaactgaacttttacgaaatgtatacagtggaacaaaacagtaaagatgaagattgggaaatatcatggtgtatgtgtcttgcacacaccgataattgggttcattggatccaatgtgatacaggtcattaattgccactcttcctttttgattcctattcactattattacttttctatcaggctgcagttgttgtatcgtaaactactatctatatgagtttgaattaactatatttgtatatgatagattacaccactttagaagtttcaagtgttcagtgatatgataccaaacgctaccaattgtgataaccttatgattattagcttttgataatagtcgacttggaattaatattaatagataacttggatagataaaagatgtagactcactccatatctctagacctaataataaaaatgtaactttaccaatataaccaatattgactaagtaatacatattacataatgggatccatgatctaacttaacactttttttagatctcatatttaattaccaacaattattaatagttaatagctacctggactcttactatatgcattatctatgagacatagtagaagttattgttgagaattagcacctttatgtattgaataaaccagatatattctcaattgtattctatgactattatgtaattatttgtacacaaaattatagcaatgttctttactttttatgcagaacatgcttttaataatatacaaaaagtgtaaataaaattaaggtatgatacgagaaaatctttagttttatttatatggatatcaagtgattttcctccacgaacagtaaaatatgtataaatagtttcgttgtttgttatctgttataatctcattttttctatgtatttcattctggaatattttatttcaagagaataagaaaatttatctaagatgttattgacactagcagtcatatgttaattcatggtctctgtatcaaaacctttttaaaaattattataatattaacatgttgaactgatataaacttataatagaatattggtagtatgatgagttctcagtttacttataatagggttggtggtgctgtgaatttatctcatgttgcttagttttttattctacataactaaaatacatgatattgtgtcactcatttaatatgataaattcagattactaaagagatcttcaattatatttcaataagccataaacacagcaataccctataacaccacgacaatatctcactagtcagatttatttctatacattatattctcttctctctaccatacatttaatattttgaagtgctatgtgcattaatacatctacttctactgatatcctagtaatagctcttattaaattacactacccactacaactatcactttgcacaatactatcttttattgtgtattatgccataccatagcaaacaatatagaatagccacttattcattcttacacgactttcttgatctagacctacaagttggttaaaacagcactgtttgtagaactgtaactgccaacatatgctaaaattgtcttcttatcttttcattctttttcttttctgaaatccaatttttcttaaattccaaaaacttttttcaatcaaataaaaacaactcaaacagatatcaatcactgcaccacacaaacactgatgtaaacaatacaaaggaaacctgcttacagacaagaacacatcctcagttgagatctatgcacttcacaaattcacattatataacattgagatactcccattcaacatgatataattattccataaatatatttgatacagccaaccaagatatccttaactatagagagtatattcacgacaatccactttgtacatgggttattactaaggaagatatttataaacaaaataaatctatctttatggtatggttactctattgctatgagtatttacaaatacataaacacaaacacttacagtatcttccacctaaatgatataatctgatagcacatatcaatttcatatagtgatcacttcaatactactaccatgaaatctattcatatggatgaacctcacagtataattatcaacactatgccaactaccatcgtactactactcaactacatcacaaatattacatccaaatcactcacaaaaatacaccctaccaataaccaagattatatttcttcatgaaaatttattcattattgccgaatgtcaattagtaaaattccataacactgttgtcagttcttacaacaccaacataatatccaacaatcaacagtattaaatcaaataatacacatgtatgaacttgtaaatatattgtaattaaaaacaaaaatggtttaagtgtgagatacacaacagaaagtaggttttttgctgatctgtgggaattattttatctgagttaccatatttatatacaattgagaaaagtggaatagtgttcgttttgagtattactatcaaatgataagttgatttttcctactttatacagtgttatctaacttattcaaacaaagaacgttagtttagcttgagtaatcaatttacaagatgttatgagatatttaatacaatgaaacaggaagtttttttctatgaaccagcagctttcaacaaatgtctagtgtttcttttgttatggccatcttttgtggataaaaattaatatcatatagtgtattaatgctatgagctatgtctgggttaggtgtaaagttttttattgtgcttttatatgatttcactctctaacttttgagcatatactgaatgatatccaatacagttacgtgaattatcctctagtcatttttggcttagttctctaatgaattgtacaacatcaatactttcttagttcaaatatttttggttgcaattgctacctagtcaattagtggtagtgcaaaatcatctactgttagaatattgcaatttacgatgatgatatcattagataaagaaaaataaatttggaaacatattaaatttttattaaggtttataccaataccagtaggtgccattcttgttggaataaaatttgccacatgatttatgaataatcaagttattttatttgtacatttgcatgtattgaaatgattaaaaggtgaaatgttctttgattaattaaaatttattgagattgaaaaagataaagaatgagaaagagttaggggtatagtatatagagacctgtttgagttggtgtattacataagccagaaatgtttaacttgttagatagtaagatgttatttaagatagttgcaatgatcattattgatatgttacctgatgatcaaacaaacatattaatatataaatttctattaagagtataaaagcattctaaataatgatagctttcttggttgagatatgaataattaataatattaataacatcaaaaatatcttcagtaagtaatagtagcaggtttatttattgctcatatagattatcatctttttctatctcattgtcatagtgttgtattagtattgggataatcaaagagattattttaatacaatgaactgtagtatcacaaatagttctgttaaattaatacaaataatattctactaatgggatgttcataatacagattatatttataaatacattattggaagagttgttagatcatttataacagattagatagtttgaaacacgttagttatgttcttgttctaatacttatattcatattggtaatattacagttaagatccaagatagcacacagtttagagtaaatagcaaattagcctcaacataataattaatgagttattataaatattcagagtttattgatattatttattatacaaaatgtttaaggttgtaattcatttcgagatttatgttgctatgtctaacaaagagtaacaaagttatcagatgattgggatatgagtagagtaaataatgtccattaacattgctacaataaaaattaatacatccatgtaagttataaaaatttatattaaagaagattcgaagataaaaggagtatactgtataatattgtatcttgtatattagttatgtagaaagaaaaaaccaagcaatacaataacaatttatagtaccactaatttcttactataaatatcaataaaacttataataccaccaatatcctattgtaagttacattttcctattattttagtctaaaatgaactctactagaatttttgattccgaagccttacgtcaacatctatgaagcaatattaatatatagttggcggctgctttgtacaatttttataagaatctatcatctcttaatatttatatgtcgttctatatttgattttttcttttccgtccttcttttttcgtttgttttttgcatatataatatttaagtatagttattaatttcattcttatacaaactttttgaaaatctttaaaaaagtccagacaaaaat

SEQ ID NO: 13 - DNA, 1119805 bp, Kazachstania heterogenica
  source 1..1119805: mol_type = genomic DNA
attaatgttcagttaaattattgtggttttataactccattatttgttgttgaatgttaacaatttctgtgttatactgttacttttattatgtcgtcgaaatagaatatttgagaatgaaacaaatggaacaatgagattccaacatatgacaccactggaatgctgaggaactgttgcttacatgtcacaaaatgttaataatactgcttgcttgatttttgccattcatagaagagaagtaacaaaatttaacatacacaaagacaacattttttcaaatcgtgtttcttctcccgcatacttttcacatattatcatttctgtgttatacatacagaagaagatggaagaactttaatacaattttgtaatatatatttatccaattacagtattgagaatgtttactatttattcaatgactacgagtgccaattcttaacaactttaatatactgtaataaaatatatattgttaatgtgaggtgtgggagaggcaactatgaatttacagaatgattattcatatgctatgactattactattattcaaagaaatcacaatccacaaaactatttctgaaagtatttccttctctcttatttttgagtttggaaagatcattgcattctgacagttaattttctagaacagtagttgtcataactttttcaaatgaactataccatagtactcttgagaataaaaatatgaattgtatatgggtaattgtcaaagaattcattttctgtaattgatataatttctgtattagttatacaaacactcttacttatactcagatatagtttttaacttgttgttgctggccttattctatagtaagaattaccttcggatatcatccccaacatgaatgtataaagatatctgtgaatgtatttcattatcacgacaatacatcatcttataaatttcttatatccctatggatcttattaacaataaaattattacgttaacattaggataagttctattacatgaaagtatttacagacacgtaacaatcgataatatattttgtaaaatcttgtattaaacatcaataaacaaaatagcaaccattagataattattttatcaatcttttttttctacaaggataagacaaaacagaaagaacctattcgtttttatgaatctatgattatattactgttgtatttatttgttttttgaattgttttgaagaacacttttaaagtggtatgatggggaatatttgatttttcttttatgtttttttgacagcactttatcaataatattcttgcatttggtttaatcatcatgaaagtttgggaaatgtcatatcaattcttcgtatatttatagttcttgaggtcttgaatatgttaatttatgctgttttggctgtattgttgttaaaacacaagttttttgagaatcaaaagtattagggtgttgtttatattctgtttatatctatttagctagtattaattcctcacgttttgtaaatagtattgaagcaagatatccgatttcatgaataccttaatatacaatcttgtgatgagaagatcgacccaaaacattacaaaaacttataaatatctacagttgtaattatatataaataaagagttgttacaagttctccagagaagtgatctttatttatatttcaaaccacagtgctaagagacctgttttaataaataaacaacaataataatatttgttgattgtctaacttacaaatatggaaaaattatgctaggctctaaaggttcattatgagtacttatttattaagttgtaactatttaatcctcgcgtgtgatgttctgaaacatgatgagataagagaaatgatgttgtcaataatacaaattagaatgtgtgagtttttgtagtcgattatcaaataatccacgtaggaaattttatatcaaagctcacttaaagaggtctttgatccagtttgatagatcgtagggataattatcaacattggattatgatatagttgagtccaatataatataattagacaatatatcgtatgttcacaagatcttttttgttaaaaactgattttggtagatcgttggtaatttttttgaaagaagtaaagttgtgaaagatcaatatgtatttaataataaatacaatatatactatttgcatgggttttcaataaacgagaaatccaatttactaaatacttaaaacataacaacgttagactttaagtctactatagttcaggagataccatattagcatccctaagactctaatcccaaatgttaaatctacaaaactatatttccataaacaattaagattatttaaattaaatatcattttaaatattttcataggataaatgcttgatcataaacagtagaaagatggtatagtgtttaacataaatctatttatcaaagtcttctttgaaatgaaaaacgtaagcagatttttcaaatttgtggctttcactgcatatagaacatgtagattgtttttgaatcgatcttgttttctggaaaataattttgtattattaggcatagaatatttctcataattctctaaaaactgtccaagatatcttttcccatgagtagagcaaaaattatttcccatgtcaaatgattatatgaacaatttatatttaatccaccaactataccaaggtaaacaaagcaatgagctctttctaaaaagtttctgaaacatatatatcactatctctttctttaaatcacaaaatatgagtgaaccacaattttcgaaagaataaaaataacaacgatagagtcatttgttttacgataaatagatcaataaatttagaccattctcttttcatatgtaagatatagaaacaatgtaaacaacataaacataatacactggattaatgtgatccattaatggtcactctgtcgcatcttatatttacacttacatttctaggtttattatggtaatatcatctaggaaattttattgctcttttaaatctataacattcaatgttattcacagtatctgctatcatgatattaacatgtatctttactatggatttatacatagtagactaagttcatatcaaccactattactttcaattatgtttttattcttaaactgcttacttcatttagacattaataactggtagattgtatggtatcactcttaaactataaactctttgttaatatacaacttctcttgatattacgtcttagacaagaatgatactacacaaacacatcacacttaattactcttagcatcagctatcatgatctcttcattatccaccaatctcatttcattcaaatttcaattgtcaattttccttgtttcaaaatttgaaaaaatagttcgaaaaaaaatcaattacaataatagccacactcatcgacaaccaagtatataagtaaccagacttcttataaataaccagttattatcaacacttacgttatgcatattcatatgatataactattgaatattatcaaaccagttatttaagatggcatagttacaccactgtatacttaataatcattcatatgttgactatcagaaataacctcataacgaacttactccatacatagattgtgactatggaagactatttattgacaataccactgatcatttattgtgtatactactacttttataatgaatataactattaaagaatactccaataacacatgaacactatcccttactaatattttcaatatgaaaaatataattatatcttctatatcacttcattatccatcgaatgatactgttataataatttatgatcatatgcaatactcttttgaaattaacacataatgataactgttataaacataaatacaattatgctatatccataaacaaatttactatatcatctttttactcatatcttacaggatatttatccttactaattccaatctattatacatggatttgatttatgtttgatttctagtggttattgtaatgatgaaaaaggacatattgatttgatataatgaataatagtttgattacaccattatttcattctactgtactactttccctgttcaataatttttgttgtgtcttttattcagatgatcttattttaatgtttgaaaaataacgtaataaaaagagattttatctcgatctttgaacattgaacaacatttaagaatatactatggtggagtattaacatgttaatctttcaatttactattcagaaaatctactttcgttaagaattagtctgacattattatgactggatgtctaatactgtatatggatctctaactgcaacaaagaatgatgagaagttattgaaattcaaaaaaaaaaaataagaatttaattccattataacattaaaatagcaagacatactatatttatgaattaacatttgcaaaaatacgactgtgttatgatagttttacatcttccttatttaaaaagaaaattttcacattatcggaatccttggataattattattattattattattacaatatctttcacatatagaggggacattctcctgtatcttgtaaatcttgaaagttctacacccagtaaaagacaaaaagagatatcatatgttttcaaaggaaggtacattacgaaattctgtgtatctacatttttgtgtataatattcttaacatgtagagtaagtataatatatcatcagtgtgcaattctctgcatttgggaaatagcatgttatttctctttctttccctttttcctttgctacctaaaaggaatctccatttcttcaaatattgttagagtaattctatagtatgtctctactgttcatgtgagtacaatagttattggatatgttagcttacgtacaattgaatattatattacaaaaaagaaagaaatagaagtataaccataagtttaagcgagttaataacagtgaccatattaacacaaatatacatatatatagttatttgacttagcaagatacagtggtatttaattagtgtacatccatgtatatatgtatgtattatatgttccctatggatgtatttgtatatacagaggacagaaagaaaataattaaggaatgtgggaataaatacatttgtctagttaacttttcagtaaatacaggtaaagaaagattgtaactgtttttaagacatgtgtcaaaccttttattatgatctttgaattaaactagcatcaaatcttcacaattacaatttttcttaattggaaaagatttaaagaccttacatcctttaaaccatgatcaatcgatttatacagaagtaaatttcctaatcacaatctctttattaaaaattgccaaaacatgtagcaaaaacatacatgtattaaaatgtctatatagcaactattagattgtataattgtattgaataatttaaattacttaaaattgggagaagatattatcggtttattaggaatgagtaaatctatttgtgctgtataagatatttgaaaatcaaataaataataaaaatacacaatataaaaaatattagaatactatatacttatatagaaatatttaattattaaattatttagaattctttattttaaaattttttgcctttaatcaatttaaattaccatgaataataataaaccaatgcaatgggcaacactccacttcatcatatacatggtgctacctttaccttcatatgatacaagagaaggtacaccttcatgaggtactgtgatagcaattgatgatgaggatggctgttcaggaatatattgggaaacttgtggcaccattgaaggcatcgatgtttctgatcttctagactcattattaccgattacagtggtagatgttctagagtttctagatgttgggtgatttttaccattggtaaatgctggaccaggggtagtagaagtaacagaaataactggagttgcgttggaagcagcagaaagtgagttggtctcttcttgttggttctttgaataaacagattcaatagaactatgaccaatgatagcagtcatacttgtttcagaagttgcagatggttctggacaataagttgtagtcatagtaactccattaacaaccgtagtcagaacaactagagtgccactcaaagtagattcaatcttttcaccagatatagtggagtttccatagagaggagatggtacagaaattggtgatgtcataaagctactaaatggagatggtgtgattataacaacaacaatttcagtagaggaagagccattactgtcagtgactacagttgtgtaggtagatgtgattgggacagtgactacaccagtggtagtagtggataaggtagatggagctggagtgatcacaacaacaacaacctcagtagaggaagagccgttgctgttagtaatagtggtggtgaaggtagatgtgattggagcagaaacatccgcagtagtagtggtgtagatagttgggccacttggagatggggtgattacaacaacaacaacctctggagaggaagagccattgctgttagtaatagtggtggtgaaggtagatgtggtcaaggcagagacatcaccagtagtggtcgtatagaaggtagatggggctggagtgatcacaacaacaacaacctctggagaggaagagccactgctatcagtgacagtggttgtgtaggtggttgtagttggagcagaaacatccgcagtagtagtggtgtagatagttggaccacttggagatggggtgattacaacaacaacaatctctggagaggaagagccattgctatcagtgacagtggttgtgtaggtggttgtagttggagcagaaatatctgcagtagtggtagtgtaggtggtagatggagatggtgtaatcactacaacaacaacctcagtagaggaagagccgttgctgttagtaatagtggtggtgaaggtagatgtgattggagcagaaacatccgcagtagtagtggtgtagatagttgggccacttggagatggggtgattacaacaacaacaacctctggagaggaagagccattgctgttagtaatagtggtggtgaaggtagatgtggtcaaggcagagacatcaccagtagtggtcgtatagaaggtagatggggctggagtaaccacaacaacaacaacctctgaggataaagagtcattgctatcaacaactgtagtagtgaaagtagttgtggttggggcagaaactgggcctgtggtagtggtgtaggtggtagatggagatggggtgaccactacaacaacaacttctggagataaagagccgttactgtctgtgatagtagttatgtaggtggttgtagttggagcagaaacatccgcagtagtagtggtgtagatagttgggccacttggagatggggtgattacaacaacaacaatctctggagaggaagagccattgctatcagtgacagtggttgtgtaggtgtttgtggttggagcagaaatatcagcagtagtagtagtgtaggaggtcgatggtgatggagtaatcactacaacaacaacctctggagatgaagagccattgctatcagtaatagtggttgtgtaggtggttgtggttgaagcagaaatatcagcagtagtagtagtgtaggtggtagatggagatggagtaatcacaacaacaacaacctctggagatgaagagccattgctatcagtgacagtggttgtgtaggtgtttgtggttggagcagaaatatcagcagtagtagtagtgtaggtggtagatggagatggagtaatcacaacaacaacaacttctggagatgaagagccattgctgttagtaatagtggtggtgaaggtagatgtggtcaaggcagagacatcaccagtagtggtcgtatagaaggtagatggggctggagtaaccacaacaacaacaacctctagggatgaagagccattgctgtcagtaacagtggttgtgtaggtggttgtggttggggcagaaactggaatggtggtagtagtgtaggtggtagatggggatggggtgaccacaacaacaacaacctctggagatgaagaaccgttgctgtcagtaacagtggttgtgtaagtagttgtgattggagaagaaatatctgcagtagtagtggtgtaggttgtagatggagatggggtgaccactacaacaacaacctctggagatgaagagccattgctatcagtaactgtggttgtgtaggtggttgtggttggggcagaaactggaacggtggtagtagtgtaggaggtcgatggtgatggagtaatcactacaacaacaacctctggagatgaagagccattgctatcagtaatagtggttgtgtaggtggttgtggttggagcagaaatatcagcagtagtagtagtgtaggtggtagatggagatggagtaatcacaacaacaacaacttctggagatgaagagccgttactgtctgtgatagtagtggtgtaagtagttgtagttggggtagaaatatccgcagtagtagtagtgtaggaggtcgatggtgatggggtgaccactacaacaacaacttctggagataaagagccattgctatcaacaactgtagtagtgtaagtagatgttgttggagcagaaatatcagcagtagtagtagtgtaggaggttgatggtgatggggtgaccactacaacaacaacttctggagatgaagagccattgctgtcagtaatagtggttatgtaggtggttgtagttggagcagaaatatctgcagtagtagtagtgtaggtggtagatggagatggagtaatcacaacaacaacaacttctggagatggagagccgttactgtctgtgatagtagtggtgtaagtagttgtagttggggtagaaatatccgcagtagtagtagtgtaggtggtagatggagatggagtaatcacaacaacaacaacttctggagatgaagagccattgctgtcagtaatagtggttgtgtaggtggttgtggttggggcagaaaccgggcctgtggtagtggtgtaggtggtagatggagatggggtgaccactacaacaacaacttctggagataaagagccattgctatcaacaactgtagtagtgtaagtagatgttgttggagcagaaatatcagcagtagtagtagtgtaggtggtagatagtggaggtactgcaacttgataaatcttttcagacacagtaatgaagtactggttaattgtagaggttactaaagttgaaagagtggtagcctcggtaatagaatctatagtagtaacaattgttgtctttgtaattggttcagataaccatggacattgagaacctatgatatccatcatgtatatatcagtaccataaaattggtaaagaggatcagatggtgtaacaataatattaccttgagcatattcagcataatcatttgtacaacttgagttaaaccagtaacggtgaccatctactgcaaaattagtctgaaggtagtaaggtatggtgcccaaatcctcagcataccatttgttaaagtctatatttaaaaaaacgaattctgatccgataaaattcacaactttaaaggaacctggtacaacttttggattaataatatacataccattgtggacattaaaagtttgttctccaataacttctgtgttaagaaaaattacagccccagtattaccggtgacttcaccttcaccttctataggattattgaagacaatacctttcatatcgtatctactacgttgatacgctctttggtcggctagcaatgcagataatccaccagaattgatgataccattatttgtcatagtaccaaggtacaaaaacccatttgtggtgccacctttatcagctgtgtcaaaatcaatagtacctgtgttaatgaaggaacctgttggagctatagtgaaattagtacctggcacagtagcagcagcatttaattgcgagacagtgaatgtaccagagttatcaatacttgcaggtgcaataacaaaatcactggcagaacctgccgatttaatattttcgatgttgatgttaccactgtttgtaattgttgtagtagaaccaaattgtagactagttaacccgtttgttgaatcaccaataatgtctaaagaacctttaacatcaatattgccattgaaggaatatgaagaaccagatactaatgcaagagtagcacctgattcaattacgatatcatcggaaaatgtttgatcaccagacaaggttgttggtaatgaaatagttgtaatagcggcacttactttggtcacaagtaatcctaatagtgaccacaagattaatgtctgcattttaacaataacaaaggaataatggttactaatatttttttatgttatataatcttatccagctatttttttcttttctttgttggtttttgtttgtggacattttaggaaaacactcaggagagcaagaatgacacagaaaacaagaaaccagaaataaagagaatgaaaacaagaatcaatttgcagactgtatacaattagatatagacccacatttatatatgtgtcttttgtaaaatatatatgacaattaatcattaaagaaattaccaaaaatgaggctggagcatttagtaagatccaagtccttatgctgaatgtatatgtgtgggtgtgtatcatgcatgtacatttcgaccattccaggctgatgtcagtgtgatgtaaaagatctgcatatactattgttttctattcttgtagggtttacaaaaagatcaagagtttttctttttgttttttcttaaaacatagtcatttaatgttctatttgttgtggagcggaacatgatctggaagtatggatgtatcttgcttgtatgttttaattattattttcaataatagtggataagaatactcaatgaatatatctcttacctatgttttactactaagggtaaatacaaaatatctatagttatattctcactattcaatcgcttatcttatacataagaaatggcagttcactcaatgaaattgctgaaatagagtgttcaaattgagaatatatcttcgctactttatacataaggtactaagttatgacaggtacatactccactaagaaacacaaaatacttatagtgtgttgatattatcaaaaatcgatcatctcagcaacaaatgacaatgtgcatttaagaatttggcataattagttatttcatttcaaattaatgtgccttgtgtgttcttaacatattctgtttatttaagttttgccttataaagtttagagacttcataattgacaagtctttaaactatgtcattttcttttgtgctttgtatagaagggcaaggtttgtgtttttttttctttttttttatgaaaattaagaaaatacaaggtgggatttttcccaccattttgacacctaaaaaggaaatattgaacaatagttcaagcacttgcacatattatagaaaacaccattgttgtattaaaatttttttttgagtggagatctggaaaattaattgttaccttttacatatcagctgactgtataggaatttaattgtttaataataatagtacaaaaaatgacagttcagttctaaaaatttataacatatcttttgatttattgtatgtgcagaatatcagcagataacttttaaggataataactcttttttaaacgttaaattcaatagttctctatttacgaaagcgtagcgtgggggcatgaatattacattttttatttttcctttggtttctttatttgtaaaagtttttttgtgtttctcttttagatgttcttgaaaataagaagaatctaatcaaaaggcataataaagcaacagtttaataggggtagactattattgttacgttaagtataatgagactgcgttattttttttaatagatactcccattcataactaattacttctgcacaagtttacatagaaatattctagctagagttaataagaaaaactgttataataaaactattgttgcatgcggaacatataatgtattcaataaaaacaatatattttttgaaaagataatagttaaatagacaaacaagctccttcttctggtatattacaacaagtacataaatatatacacaacaacatccataacaacagttatcttgcaaaaaataaaagttaggcaatcgtgagtgtttttttttcactgttttcctatttctatttgtgctatcaaaattagtcagtgtagctaatctgtaaaccaggagatggcgtgattgtgttttatgcatctatttctacaaaacttaacccccctattaataattcataagtatgatttggaattgttgaaaatttgttgcgagaatttttatttatcaataaaattaaacttaacaaactcattttctttgatgtcttatctaaaaggtcactattatcagtaatttccctagattcaccactactgttggccaacttttcaatattggtaatttttaatagagtgtaaggttcattgtcaaattctcagtttctttggaaatatttggtaaatctgttactagttgtccgatgttagagcagtggttttttatcaattgatttaaggttattattattctatatcatatcaggaagtaagaaaataggagttacatattaataaataataaatttagtttagataattaaattctttgaaaaaaaaaaaacagtaatagaatagtggtcataatgttacaaattaaatgatattcatcttctccgttattatacaataattgagcaagtaatattcaaaaattaataacgaagagatcataattttttgttgtctaaggaaatgaaaacgttgaaatttgttgaagtattttcattaaagttttcttaatgctgaagaagaaatgggatagaaaaagaggttaagaaagttttgaaattcgatttttttcaagaatgtattttgattatttatatatcaagttatggaaattttcttattcaatgtaacaaaataattatttgcaagtcttagatatgttccaaaaagggtaaaaataagattatttggcatgagattttatacaaaaacactaatagaatcaaaatgtaaaaaagagttgatttttgatagtttttaaagttctttttcatacaaataaagttctggtattaagggttaacgttcttacatatttaatatgtagtatacaatcttaattataactagtatacacttacagtgtagaaagttatagtaaactacttctattttcttctgtggtacaatatataaaaagcatataaaggataaagacatgatatgaaaaaactattgattttatatatatttatatttagcttttctcttttataggtgacaatttttttatcaatttatcttggttaaatttattaataagtaagcaataaaggctctttattttaatagagatttgtatttgctaaaatctaattgacctatctatttattatgagacattcaattttagtagaatgtcagagatattttagtatcaacccatatttcttagttcttttaatttatacctgagtcttcattgatgtaatttttttcaatcttttcagttatttagtatggtgaaattattttgatagagatatctctaaacttttttcaacagtatctcatttaatatgttataaagtctgtactgatattatacatgaacttacattttattaagttgtttttattaattattaaattaaatatatagcatactattactattgaaacatcatttagttagaatctgatggataactgataagaatattcgtaccaataatcacttccgtcacaacacccctataatcaggtgttttttgaatatgttagcggtgttaatctaatcatttttgaatacatttgagaatgtaatctacacattaaatgcatacagacactactgtttcgcattaataatatttgtatttatagaataagaatgaactaaaatattttggtgtaatatagaataaaccatagtatcacatctattattgcatatagagaatatgtaatatggaggatctaattaataattctagctatatatatgtcttatattgaaagaacaggagataaatatataaatttcatacaacatttgctctcaaagtaatcaaatatactgaactgagtaacatatatagtaataatacaaatacaattatgacaaaaaagtgaagatttatttttcaagattaaacttggaaaaagagagtatggtgtaaaatttagagcaattactattgctattctttcaatattaataagataatatcatttttttatcaggttggaaattagcaacacaagtaaatcattctctgatattcttgaacatgtaacaaaatctatttaatctcaataacatctttcaaggtggtaagctaatgtaaagaatatacaattacaatgcattaagaagtacaaaagttctctcactaagtatcatgttagtcactagcaggtagttttcgtacagatggtcaagagttattttgaaagtttacaaaaaccttgtttcttaaaagtaacattcttcaagtggacaaaatgtgtaatttttaattcgactaaatatctattattattaccttaagaagctccaggtatattgatacggctatttaatcaaaactaatccattttctttatatctttgtttcctacatgatataatagatagcttaaaagtatctcattaaaaagaactatgcaacaaagtttatgtatatcagcaataaaaagaaagatttaaaaaatagggtaaaaacaatcagtttagagtaagaaaagaaaggaactgacaatacaatcaatttactatttagaaattggaataataattcaaatattacataaagtatgaaaaaatccttgtatcaatatgcatgttaaatgatactattgcaattaacttgttttttaaaactaccaagagataatttagttaaaaattgctctggcaattcatcacaaaaattatgaattgatattacttaagtaaaaaataaagttgaagaaattaaaataaagacaaatgttatcttattcataaatggataatattctcaccatgcttctttattaatgactgttacttattatagagttagtaattttcaaggagaaaaatattctagaaagagaacaaaaataatgaaagatcaacttgtatttattcgtaaacaaaatatatagttatatatattacctatataggttctgaataaaccaaagatccaatttactagttagttaggttattgaaaatgttaaatataaaatctactactttccaagaatgttgatctagtcaactagaaacttattgtgttagcagcattagaatcaattttatttggaccaatctgattcgacaaaagcctttgcagacatgtaacagtaaatatcaatgacaatcaatgcaacagattttggtaaaatcctgtatagaatgtatgaaggaagaacaacaataagcaaaatagcagctagtaaataagtatctaaaaacattataacaatctcttgattcgtaggaaaacgaggtatggcttttgataaaatacaaacagatgacaaaaaagaattacggtttcgctatttttaaaaatctatctttgtgtgaaaaaagcttttgacgttatgttaatataactctttcaaactcttaatttatttttttaataaacagaatatatgaacttttgttcaccaaagtttaaaatatttagtaattatttaccattcaaaagtctcgctactattttgttgtgctacatgtatcagattttatatattggttgcgtgtccctatttactaaattataaatatgcattttctatatttaggtgttctaaaacatgatgactcaaggggattgattcagtcaagaaaatgcattaaatgggtaacaatggtgataatagttgttggataatccaagtagggaaagttattttattttttattcaaaaaaacctttgatttattgaggtaactggtagaaatactcatcgatatttaattattgtatatttaatttaatacgctgcataaaactaacttttatagtttaagtagaagtttcatatgggatccaatactaaagatggatggataccttcttcgataaaaacccttacaaaattttggcttttatttattgttgatatcatctatgtatcttttcctgtcttgtcataccatattctactctttaatctgcattaaattctttctcaaatacaatttgttcagtattggttccttcttccaaaagctttccctctttgtctctttttcctttatgtaaacgacatccattatccagagtctgttttgtcaattccttattctcttttctaccttttcgaaattccttcacaaggtctacacatacttaactaccatagccaacatatcaaaatcactttctgttatcattttttcaattcatacatgatttttttgatttttttgattgaggacgtatcaatctaccaagaatatatgtatcttacttcatagcagtggaaatagttagatagaatgcttcattgggaaaaagtttgggttgtaatctaaaataaatgtctaaagagtacgctttttacctttttaaaaataaacttttttatttgatagaaaaagtttggagaaactatggttgacagtgtcttgaaaaattatgtatttgtctgtttgtttccctggcttttgggatgttttcctaagacagagatctagataaatggagcgtcctattatcagatcatgtatttactggtaaattaaaaagttaactctagtttaatacgttacacatttattcttacactagatattccattgaaattcataaaaatattaagattgaacggaatcaggaatcagttttattgattgtttttggagttagctatgttattgatgcaaatttaacccactttattgagcaaaactattatgattaaagataaggtggctatccaatttaagattgatatgaaatgtccagcaaaattttcttcaaaagagaaaagttttttttttcattacaatcttgtgatattgatgggtaatatatttatgattttccttaacatctgaatgtttaagctaattagattggtgaccatctacttatttcctttatcttttaaaagacttcaaagacagacattttacgatacaaccattatagtgtccaagaactctgatcgccaagaaagatgagattactaggaaggtttttcattttattaaaagccatgattgcagtcaaagtaggtgtcgaaaaacagcaagtttgtaataataatggatgatgtgttcagcctacagatataactcttcaaaatatccctttgtgttttttgaatagtacattaccatgtttttctaaaggcaagagtattatttcatactttgacaagggaggctcttttttacaaaaaagaatatggtgtcaaaccctttattcgctaatagctactacttaaggtgctgctgctaaatggggagagttagttgaccattgtgctaactgttcaccgaatgaggaaggttgctatggtggattaaattgtgttattactggtgttgttactgttttagctactgcttatgctatcggcacatatgtccagtttgctacaatgtttatgaagagagacaaagatttatcggcattaccacctttccaatactttgatggttcacttgaactaatcttcgatgaagatgataaattatctaaaagggatggtacaaattgttcctggcataatggtactgctaccataaatggtattcttatgtgagggttggacatgtcttcagatgggttaaataataaagctaagctattatttataaggagggacactaactcaaaaaatgcgtcaaaacaaaagaaggattagcacgatgtaaatcatggacatgattcagcaggaggtttcaaatacaactattgttttctgcatcctgaacaccatttaactattcaatatgattggaatgatatcttgggtgcagtggattcacatattggtgacatggttgcacattacgatatcaattttggtgatgttgatatgaatgatacagtcgaagagggctggaaggtcttaatgggaactggtaaactagttgttgaaagttctactttttttggtagtaactttgaaacatgtgatagagacatgtttgatggacttgccagataaaaaatgctatattgaggttattccgtcagcaaaatttgggttagtagtgtagaacatttaacaggtgggtgaaaggaaaaaaaataccctgacaataattgagtgtatacatgataatttatacatatttaataaaacgatagtaaagatttgtgcgtagtcttaaaagaatatttggtggtaattctgttattgtctatttttttattttgactactgcctatgtaactatttgtagattacaattttttgatcaaactaagaggttcttgtctaaaaaggttgggcatatattaatttatggtcaagttgtaaaaatatttttaaagcttttctataggcatacctttttttataatactttttgtatgaaaaatcttaagatcgccaatagtgaagtaatttagatactttaatcttactagaacgactttccaatgagccagaacccatgttatggaaatttctttccaaactaggcataaaaagaatttctcacagtaaatttaatataaatggataaatcaattaaatatatgaatagttataataaaaaattattttgttatatctaatacgatcgcaaaaacagtattttaaaatatttccttatctttcaaaagaaaataagaattttatatatctgcctgatattatcctttgagtgaaaagattagtacatagatgattagcatcttaggtcataccttcattagtgatactacaattgctatataagttgatctattaagggagaatcacttcgtaaacgagttgttttcgtattattactgtaaggaaatatagtattccagaaaaaaatggaattacaaagagcagtatcattagtaatagtgagtgtcggctatttttgcaaaaaaagttctctccagagtctttctgaagtaaagattttttatgttgtctgcaaatcataaaacctttaactgctccaggtgcattctaacctactatcaatgtcacggcattcaagacaacagctttgatagcattcgcagcagctgtagctcaatccccacctgacagattcttgccactttgacccaaacagggaattttctgtcaaaatatgtaaatatcatctgttcacctaaagcgatgtaacagcagcatggaaaggcacgctttttaaaattttttcatcttttagtgcaacacaatttgctaaaattaacagagaggaaaataaaatgctacctaataacttaatccctatgctcttcccgttacaaagtcaatgtttaagtaatttctctttttaattaataatggtagacaaacgatagtgtatgtaatttggaggaaaaaatattaaataacactgaattgttttgtcaagtaaatgttccctaaagtgttaaatagcgagcaacttgaaaaaccttcgaagttaaatctcagcccaactggtgcttataaattcactgcagtgaaaaagcaaatgtaaagaacataaaataataatttttttcagctacttaggagtatttgtgtatatataaaatgaatatacacctatgaaaaaagcatatcaggggaaaggcagaaaaaactttaggatgagagtgtaattgattatataaaaaaacaagaatacttcattgactatttcacaaacaagaagcagattattctatttgtattaggaaaacttttaattctgtttatatagaattatgaattaaaaatatgtcaaatcaataacacaaaaggattaccatttattagattcgattgtataactaaatacactctctgttaaagaatacacttcacatggttcaagttccatcatccgtcaatattttattgattatatacatccataagcacatgaattcagcagaatatgattgatatactctaaccattaatagaatctaacaaaaaatgctatcattaactggaaactaaaacatcttcattttttctgtttttttttttttttgtttttcaccatctgtttcctctttaactaatgtctattcatgaattctattgtgaattgccatagagatctagaattaaaggatctttttgatatctttgttgaacaaaatgaattgcaacaatatcatttaatagggcattaataagggggtttgtggcttggtcgaagaaagaaagatgaattgaatccaaataacagttagcccattaaaaccatcattgtatttctgtatagaaaattgattgcattgttaatttctttcatatcatattctttgtgagcagtctttactctaatatctaaactttttttttcttatcaccaatatacctaaattttgttgtatcatcctttttcaattataggtctttaaactatgtaacatatcacatatgaaccaaacacagaaagaataataaaatactccaaaccaattgataaagcggcatcgatacacctcatggattttttaatttgacgataatgataaaaagatttgttagaattggaaattgcacatcctttctcacttgagcgatattaattttaagaaacagtgtctttagaaaatgttcaagatagttgtttctcatttattgcatggaataacccttattaattaagaagtaactgatgagaaaacatgtgtaaatcccaataaaatatacatgtgtattttgtatatcaactaattgcatagaaaagaattattgagattggaagaatttttgttacatgtttgagagtattggatcaggatctacttttgtaacttatttcctattcgacagaaaaaacgtgacattatcccaaaaatattgatagggtggtcatagaaacttttcataattttacagtatacttttttccttttccaagttaatcctagcacataagcctttgctattttttccttatcccagttttagcattacactatataatagttattcatgaatatttaatcactttagtgatgaatgttgcaaagtgagaagtacgtatggaatctcattctttgtttatcatacgacttagaaatctactattaagtataactatgccaaaaaagtaattgatgctaagcagcatgtttttaatcatgaagcaatttgactttatgtattatgagttagtttcaattttaacgtgcattttcatatgccaagattaaaggtgatttgatgtgttatgttatgagataaaaacataatattattaccatacaataatcttcctttttcaagaaagttacatatatttgtcaactgttggttacttttcttgaaaatgttacatttatgagttgaatagatttgtattactattcacactgaaagattatataagtattatttttattagctatatttttggtatagaaagaggaaacggaagaaattgtttaaatattgttgaatatattttattgaaataataactaaatttttctcaatgaatctatttatatttgaaaattgcatagaaataatgttataaatatgttatcatattatacagaagcatacagatatttacaggaaaaaaaataaattaattattcataatcatacaatatcattagcaatgaaaaattatttattaaaatgaataaatttatttaccgtgatagtaatgatactatttaataaataaaatatatgtgattgtagtactaacaagttccgtatttttaaacattttgaaaaccaatcttccaagatgttttcttttgtttcagcaattatggtagtataataatctaaatacagagtatccatttccctatgtaaacattttctttaatctgcccaaaaatcctttctttggttttttttgttcttctttggtcttattctctgaggaagccgcttgttttgtgggatttttatttgaagtatcgtttttaacgtttttagtattaccttccagctgtgtaatattagtagttggattgttatgagttttgtttatagtacttttttcaactgttattggttcagattctttgccaaatttttctattgtttcagactgtatatttggggttccactttcgatagtgtaagagtcctcattattttctcttggttgtggcttgaaaatgttgatattactatcttgtggttgatctatctcgtcatgcttattaatattttctctatgttcactggtatctctatttatgcttctaatttgttctttattcattatattggatggatcttctgactttgttttgtttttcaactctttgtttaaacgattatttaattcagttgtattgacatctctaatttcagagaattcttgaatattctgggcattttctggaactactggtcctggacctccaatagccccaagaaatgtgttttgattattacttggttgagttatgggtaatatatggactgtattattattactgtcggctttagcattttgactagtagtagtattagtagtagcagctgttaatccaccagcttcaggaatctttaccttattttttattaatttatttgttgcaatgatatctcttatgcgaatataattattttcaaaaccacaaccatcactagtttttgcatattcatcacttacagtccaatctccatctacaataaacttgaaatatattgtatcatcttcgtcttctggaggctctgtaaagggcacacttatttcaaaagaaccagaggaaagtttcaccaaaggtatagaccccttccaatcatcaaatgtacctgtaacgatgacatcattgggaccagctggccaggtaaatgtaaaattggttgtatgtggcattactcgaatatctattatatatatatgtattcactgaaaaagttaactgttttcttcttaatgtagttttcttttttttttttttttcttacccaaaaatttttcactaatttgtagttcgacttatattttattggcacttaatcattaaactcagataataattagcatatgtgcaaaagtacggcagctatactttcaattaacctactacacattacgttcttgcgatgttctttatgagtatctccgtgcttatttattccatctttgttgtcgtttcccctgcatttaccattcagtgcctcctgagaaagacaggggaaaactgcaaacaaacaaaaacacaaaaaaccgttgagtgccagccacacataacataaaaataaacgatggagaaaaactaaaagaaaaaaaatttaaaaaaaaaaaaaaaaaagaagataattttctcatgttcgaattttcgaggagctgttttttttactaaaatttcttctagaatattgaaaaaatcaaaacgcgtaagaacagagaatctctcgaggaaaaagaaaaaaaagattatttggatatgcacaaaagggatctcatcctttttacttcctttgagcttgagatatataatatatgaaggtcgacgcgtaaaaaaggaaagagtatacattgtcattaagatatttcatgaaggtctatcgcaaaaagtactattctgtgatgatatatgttcttagtagtgggtaggtaacaatatcatataataaatatgttggtagcagtaagtggaacgaaatatagtggtgcagatttagtagttaaattgttagtggaaaaacatgggtttgagttgttagattatcaaaagccggccatcgagatattgaattatgctactgaaaattatagaaataatctagtcatattatgtgaaacattggaattgctagttactttagagaaaagaactttttttgtacatttatccgttgatgcttctgttggagtcagattgaaacgtgcacaagaatttactaataactacaacggagaaaacgatgatagtcatattactaatgaaatagacaagttaattatgcttttggatgaacatgattttaattctgaatcaatagaattgcgtgaaaagtcacattttaaattaaaaatagtgggaaatactttaacaacattggaaggtagattaaataaagcattagaaaaacaaataattgtatttgaaaacaaaaaatttgacaatccagaagaatctaatccaccattaagacctgattgggatacatattttatgagattggccacattggcagcctcacgttcaaattgtatgaagagaagagttggttgtgtcatagttagagattttagggtgatagccacaggttataacggtacaccacgtcatttgactaattgcttcaatgggggttgttcacgttgtaatcaaggtgattcgcgtaatttacacacgtgtctatgtcttcatgccgaagaaaatgctttactggaagctggacgagatagggttggtagtaatgcaactttatattgtgatacatgcccttgtctaacatgttcggttaagattgtacaaaccggtatcaccgaagttgtttacagtcaatcctacagtatggacgaagagagttttaaggttttgaaggcaggaggagttaaagttagacaattcagttttattcaagaaccaagaatcatcattgtatgatgtcttttttcctactctttttgtgtgtttatttttattttgttacaggtacagaaattagtttactaaagcatttcagagtagagaagggatgtgggtagttgtatattaaagttagatagataagtacatgcattatttatagcaatagaaaatactaaaaagggggtatcatatgcattgaattaattttattatagttggtcctctatttaaatatttaattttttaagctgtgtcagttatgttacataaatatatatattaatgatacataccaaattaaaacattatgttatacgattttggtaattttcatcaatactgtgagagtatatgtgcttttgattgtcatctaacattttgaataggtgggtcaacaatgatttctactggcaaaatcccagctgaatggtgtatattatatttttaaatgaaaaatggagagtgcaacgaaaaataatataaactttctgataataaatattgcgagtttttttttatctagcttcaaattgtaccattctcttagttctagtttttaataggattctatgaccacattctttacaacgaactggatcagttctggatagagataatttggcagaacattcagcgcatatatattttaatgtagctgttctagactgagaggtaccagaagcagcgatatctaaattagttggaatttggaaaccttcacgagacatgataaaccaagtgcagattttttccagatttgttagcccttatgactaattttgttttgtatatttgttttcatcgtgaactgatacgtgcatatatcagttagtactattcaactcctcatttccactttcttttaccactttttttttctgttttttcgaaaaaatgaaaaagaaaaatttttagaaaaggtgagggtaaccttgattaggtaaaagaatgacaatgtgttaatgctaacagggacctccattaaaactaaaattgatcgactatatatatttttaaacgtcgctattcatttatttatttctatattacatatatataactatgaaaaactttatttatatggatcatgaataaataggagtctacaaagtgaaaaatgaatatgatgaaaaagacacgaaaagagaaaaaagaataatgctaataaataatcatataaaaacaattaactaactagagatggtttggtagatggtctttgtgcgtgtacttgttatagtggaggcagcatcaattgtttgagatgggccagtaatataataagtactatagtattcatcatcttcataatatacgtaacaaactctatcttcagagtttacagacgtgataaggatactttgagtattggagacactagtagattgtggtgttggagtgatagtagttagaattctagagtaactggaggaagcttgtggggttaaagttattgtttgagaaggtattagggtattaacttgagatgaggataaggtactagtatattgactactcttaacatccatgacctgactttcagttgcagacacaggagaaatggtagtagtggagctgatttgaggtactgaagtatattgtggatcagcaacatcttgagcagcagctgtagtaataacatcattcgacgattcttgattagcaaggacagcaggtatagatgttattatagtagcttgagtagtaatatgttctgtagttgatgttacttcattatttgctaatgtaatttgtctcacttgaacggttgtataataactggttgaaacaagaacagtagcaggttgtaaggtctttgttctaactgcataactgtaaataacaccatctttggttattaattgtgctatatcagcagatgcaattgagaagactgatactagaaggaaccataaaatgtttaataacttaacttgcatttttgatatttgtttttcttgttatctactgaaaataaaatgagagactagagttgggaaataaaataattgaaaattaaggaatgactttggtaagttaactaatgatattaaaaagaaaggaagcgaaagaatttataaaggagtggacagttttttttaaaaaaagagaatgtaataagttggattaaaaattaaagttttaaaaatgaaatatcactaagttttctaatacaccacaattttgtattgttgctatcttttccagagtatagtatacttctaaatatattttggttaatgatataatattccttgcaaaagttgtaatcgttggtgttgtgaagcttgttttactgtataacggtggtgaattagggattcattcttctgacttgtaataaacagtgtttattgcatcctttatatatgatgaaacattttgcaacaaaaacacatgttgaagtcattctcatcgttttctttttttttgaatatttcaacatggcataccaatacattttaacaacacctgaatgaatagtcgaagatgggaatgtctgctgggttattcatatttatgtttatcctaattggactaaaaatgctgaactagatatgtatttgaggtttataaaactaattcataagatagtagtcgatcatcttcgaataggactagggaatatagtatttaatttgtctaatttcttatgtatatgcggttatttcgtgttgtattttaattgctgaaatgtttgttgtgtaaacaaaaaaagagccagcataaatatttttgttaaccaaatatgccaagaaaaaataaaaaaaaaaaaagtaaaaaaaagagggataaaatctgttaagagtaaaaagacttttgaggatatattaggaaaaagggctttatcaaacgaatgactccaagctatatcaaaggcacgattgaagacctacacatgatccttagtgtggtttatcttgctttaatggagattagaaagtaaaataagataaacgaaagaaagaatacaaataatattatgtttcctttgttctccattctatgtatagaatacaccttaggattttgtataagaaggtaatattttgtctataatatttacttgttattcttttgttgacactaaggcaagtgcaactagttctaatgctaaatgatcgttaattattatgtagaatattgttaaataaaaaaatatttagaaaaaagaaaaatacatcgagtgggaatctcctcatttatattgtgtaggatatcccgcttgttcattataaatacaaatatcgaagaaaaggttgtttcgacagcctggaaaatttgagtgcttagtaataattattgttatagaccatgtcatcattcttgttgagattaacactaaactctaaatcatcgtccgtggacatgtcccatgtcttataaaccatcataaatgtaaatgtattacaaagactgccaaagaataaaccgtctagataatggtttacaccctcgcatatctgagttgaaaacccataagttaatatttgaccgacgacaaaaaataatacgcccagaaggatagaaccagtaatccaaagatttcttaacataaccaaagatactaacaactggcatataacataaaaaaatagaaaaacggtattgacaatataaacaacaatgatcattgctgtggcatttgtcgaatgcatatcattatgttggatccatgatttgaatgttaaaatggaggctagaaaattggcacagaatccaagaaatgatgtgatccttacaattgtcatagactttctagtcccatcttcccagaaattaaagggtaataaaccattaatcaataatgaccaacaacaggcaccggcaataccaatttgaatggctacaaagtatggatacgaacccgaacctggtggagaaacaccacagtctactattaaagtgaaaatgattaataagagtgataggtaaaaaaaatatagatactcggctcttccgatggcagtatacttttgtctaatattaaatataataattaaaatagttcctaaggcaccgatattaataaatgcattaccaactccaaaaatcatagtattggataattcaatggatctagcatagcaacgaggtaatataccaatatccaagtgctgtggattgaaattatttatttttgtagaattatttaataacaaatgtgtagtcgatttcactactgagcagagcggtagtggtgtttgagaacaaatatctgcaaagttacttatacccatgactattcagaaagtaaaataaaaaaaaggaagaaaataaagatcaaattataaaaatacaaacaacttttcttttttgtatcaatgatttttgatgaacagaatagtatttcttgattaatatttttttatttttttgatatttaactttttaacgattatgagcatttgataatgaatcaatgtctgaagagaatatggttttttttttcttcgaagtaccttacagaatttatttttcaaagagttgtaaattttcatttatgacagattctatttttaattttttaattttttttttttcgtgatgataaaagcaaacgtgtaaacttaaattactatgctttttgaaaaaagtcaaaaaaaaaaaaaaaaagaacaatccagaaattaggttggaatttgagaagacgaaaggacaaacagagaaaatgagatcaacgtgttagtttgttatttacactctcaaggtagaagcgctacaaaacgataatatacagacatcaattctgcataatgattaaagtaaaacaaaaaaaaaatttttctttttttttcaatccaagaattcttgcagtatagcttgttattatttacctgagcattccactaacagaagtttacactcacacttccccagcaacgtttattaaaaagtacaagacgatagactaggtgaaacaaaaaagagggaatgtcggttcagctgattcctcgtgcatcacaatcgaaactcaacaccaggcgcccagcaacgtccaatagatatttattctacgctaagcagatactacaagcggaagaaaatatattggttcacaaaaaactgagtctcatccatgaatccctaaaaagagaatacattgagggtagtactgcatttgcgagagaaaatgatgttagttctctttgtgaggggaagatagaagaaggtttgtagtaggaaaatggtactttcaagggccgaaagggtgtttgacttctagaatttttctaaagttctcactatttatatgaatagaaaattttgattttttctcattttcttttttatttttttttttcttgctggtttacttgatacgaaaaagaagaaacaatacatttctttcggattaattcatctagggttttttgtgaaccactttatttagaatattaacgtttttatgcaaaactcaaagaacataacataataagagagcagtgaacaataaataaatacaaataaataactatatatacatatagtaactaaaaataatagtaaagaatcaacatacaaaaaatataatataatattttttgtattttggtttctttttattttaatttatcttggtattcttactttctctattcttctggataggagtctctggtggaaaggtttgataaaggatgaaaaaaagccatgatacagtagatacaacgatgaatattatagctctcataggctcttcaacatctagaaatgggtatggatatgcttgacctttggaaggatcaattaaaaagaataaatatttaaaataaccgaaccccaaaagagaaacaatgaaccaagctttagtatttgatatttcaaatttacacccaaacccagagaaataatggtcactcagtagaaaaaggaatgggaataaatgaattgaaagatcagtagagattggaagcggatatggtttatcttttggaacttcttgtactataagagtttgtgcaaatagtcttaatggccaatacactataggaacaattgtctctagtgttaaagcaattggtaaaatgaaatgtctacatatgtaattgaaaacaaattggttaccattgtggtttggcctctgaacaaaccaatttattatatttaaaaaattgctgataattgtagctactaatgacaaattggttaaaaactgtttatgaccggcttgacttaaacttggaggcaataccaattgtgtacatttaaaaagacctctaccacaaaggattaaactggtgatattgaaaaataatgatcgtttggttggaattaaataattgtgttttttaggagttttactgttcgatgtcatttttcttgtttgtaatttttttcttctaaaagtctgtgttccagatcagtttcttttgtaattgttgatcctttctgatatatctgtttaattaaataatgtggtagatttctcctgatatgctcgacacagtctttctttttctttcccttgcctatatacgtagcttatattatttgatagtgttgttcgaatctagtagtattttctatttttttttttttgtttgtttgtttgtttgtgaatacagcacgagttaagagtgaagagtatatttactgacacataacagcggtaatggtagtatagtgcttctctttgaattaactgaaacttaccatagagtggaaaaggggaacccttaacacaaaaacgagcggttattatttaaacccgagggtttcatatgcagggtaaccattgaatctcatagaaacaaaaaaaacgagaattaaaaaagaaagaaagaaagaaaaaattctgctagtggttgttgatatgtatgggtgtttcttgtgctagattgtaagagaggtagacgtactctttataagctttcgttgataaaagggaaataagaaaaacgagtaaacaaaagaaaaaaggtgtgatgaggtctagattccaggaaattagaaatgcagaactatgtgacgcaaaactaagaactgcagtccctcaaatgtggaagaataccttaaatgctcttttgatagtcaatttccatctgtagtctttcagaagaagctcaataaatggctagttacttttggttctgaagggtccgaaaggtgtaacagagacatgcaagtgaactaaacggaagagggaagatgggaaaaattactagaattggtttgcatgtacgaacatcctttatgcataataagagatgcactgttatataataacatcaattgatattttttttatagggataggagagggagggggagttattcttttaagcagatatttctaaagggctctctttccttttaatatctgtttgattgttcttctaagggaatattcaatatgaatatatacattctttttgttgggttttatgttgagatctatgaagtattatgaattatcttagtgtgaaataggaagacttgtcaaatatcttttcaacccttttctttttcgtttcttaatattaattaggcatgagatcccttaagtacattcattatatttattattgacactattatcattattattattattattattacgattttcacatatgaatttaatgattattatactgaaatatcttaaatttttttcttacttgtgtcttgatcctttttttttattaattttgtagaatattgaataatatctgcctatgtatatgtctaaaggtatatctcttttcgcttaactctatcatctcactaaaattttcatatatttgttttatatataaactacaacagagttgatacaaagaatcaaaatagagctggtatatattcatttcttgttcttatttcaaaattatcttatctttctttttttttttgcttctgtcctctcctcttctatatatattttctatttactctctttttattttttgattattttatcacatcatcaaactttttgagaactaataactgatttctttagaaactagacatgaaattacaagtaataactactatatttttgacactttttacttttgtttcttctacgtcattaccagggaaatatgatctatatagaagaaaacaggccttatataggcgtcaggatctgatgagtaattcaacaaccggtataaacggtacaaatggtacaaatggtactactggtggtagcggcggcggcgccagtagtggtactgttccaataattgtggttggtggagcatctactatatctaatggtacagcagtgtccaattttactggggtcttgaattctactcaacttttcacaattttacgtcaagtaaatcaatctttatcctcttcctcttcctcctcttcttcccagggaattgtcattattgcaagtaagagttcttttgaatctattgcctttttcttggctattactgttaacacaaacaaaactattgttgtttgtgatgatgccagactaggaagaatcgtggctaccgatgcgggttctcaaggtcgtggtccattgattgttggtaaaaataaagttatcttttctggtaccttgccaccatggggtgttccagatggggtcatcggtgataatgatgaagcatattggttcaccgatgcttgtccaccattattaattgctgaaaactcaaccttaagaacacaatttacaaatttcacatccactaacgtttctagcaatgtaatggttccgattgtttttgaagaaggtatcagtacaactttgttaaactcggtaagttcatttattcaaggactagtcgtcatcagttccggttctaatgcaacttcgtctagtcaatcttcgtctattccaattgtgtacacctcaccaaagagtaagtttgtatcatttattagcgatgccaatatcccaagtggtgctattgcaggtggatatctgtctcccatccaagcccaaattttgttatcagtggcaatagctaacggtgttaataatacacaaagtttgactcaaattttcccttcatgaaattaagattaatttttgaattcctatttttttatgttttaattttattttattttgttctgtcttctttatgatatttttttcctcttaacgttagtcttttaattaattaattaattacactattataatcttttttatcttactatttttgttcatgattttaatatttaacatttatatacatacatgtatgtaggtgtatgtatatatggataatttgacgcaatattttatatatatacttttaacaaaatttatttttattctcatatatcttttttttttgagttggttttacaagagcttcttaatttgaatgcaaatactccagacatataaaattaaatttacgtattctgctaattttagaaactaaatattaaaaatttactttacaccttaactaagggaaaatctgagaaattttattcgatttattttttcttatcaaattttcatcaagttgacaaaaatttataagaaattctaattagaaatcctatacatattttctgaacagcaattaatatagagacaaagaacataaaatagtcaaagatttacaactaaactgtaaatatattccaacgaatctgacgaattactgagaagcttattgtaacaacttttgatcattgaaagcgtgccaaaaataattattaacattaacaatcatattttttctactatattttacccaatatatatcaagctaacgacaattaggataataggatttagtttcgggtccagaattggtgactttataaattataagtatttatatatccttaatatccaattttggtatattagaagagcttgcctacttgcatgccctagatagaaggcaatatatactgcatgtataataaaccttctttgtacttttttaacaatcagaggttttttttgtatgctactttaaaatttgtcattaacaataatttatcaatcttattataataacactaagaacatattacaattcagttaatccttctatattttttcaaagtctggttttacttttaaaagatataaaatctttgtttggcgccattaatcattaagttaaagtgattatcactcaagaataggaaaaatctagaattttccttgttatcagaaatagaaaaaaaaattttaactttttttaggattaacaagcaatagcaaaaaacattatgataatagaattttcttttccattttccattttattttccttctggaaagatatcccaaatttccataaaaactagatctacacaatatctctgaactcataataatcaagtaatttgcaatttaaacatttcattttctttcttacaaaagtgttatactactctatattattaaacatgcaataacacaagcgataaaagtaggtattcgattttttatctcttcctacataatagttcgatatattttttgctcgaccattatcatgatttcaagagatatcgctagattatatctatattactgtattgttctgtaagaaggcttagtttatttatacaataatttttatttagagttttaaataattcttctgataaaagaaataaaaaaacaaatgttgtcattttaaaacaacattagaaaagttgcacttccttaaaaaaacacttttaagatataaaaactaaatactgaataaaaaaaaaaaagaaagtatgcataataccgatacgaaaaggaatgcagttaaaaacaacatcctttgtttttctcaaagtttgtcgttattcgaaatgagggtttatagcagatattctaggtcaactcatttacacggatctttatgcataaagtcattgttgaacgagtgatattaggataaataactcagtaatgccttatctactttacatagtcattgtttctgcacatttatagagctataagaaatccattcgaaacacatggttgcagataacaactttatatcttcttcttaaactctgatagtattggcaagtaagtgaaaagaaaaaaaagcatcatacacctcactttttgaagatcatatgatagtaaatacttgcatgtgatcttaaaggaataactgattatcaattcatctttattcatcttgtatattcaatactatttgtacaattatctatagattaacaatgtttatgatcaaactacgaacgacattaggtttcaattaatacgaagttagccatacgtatacgagagggtaagactataataaattgctaaaaatcttgctttaggtttatattttttttttttacaagtgatttttgtgtgaaaaaatttaaggggcgccactaatggtgatgtaattctctaaccctacctgtaaaacagtatagtctcacaacttactgaatagaaaatatgcgtatctaatttttaagggattttgcaaatgctatgttttgaaatttttgagaatggtaaaacaatagataaaaaaaaaaaaataaaacatgtgaaaataaaaaatgaaaaagggagaaaaacggggggaaaaacgggagaggaaaaggggggaggaggaggggcagagtttgaagaaaacacacaataaaaagaaaattaataattaatgtattagaaggcctccaaatataaaatcgtccaatatttaaaaaagtgggaggctgcatttccaaaataggaaacaagttactcttttgatagatcttggaagaccgaaaactttaataacatgaattaacagatctggtgatttcaagtcgaaaatcctaacaaatattaggataagtcttcttttcgttgagagaatgcgaaaaatatttgttttcaaactggtaaatagaagcgcaaggaacaaaattatcacttatcctagttttgctttgtttgttagccacttaaggagtaaggaggtaaaaaaaaaaataaacaaggatccctcacagaaatgattttcttttcttttgatgatgtgacatacaatattcttgactatggtggtaacaacagcctatttatcatttctatatgcagcgaactagttatataatttcaattccagataaatagaaatatatatatatataaagtaatcgtattctttctgcaagaacagatgttcctcccctccttcctttaagttaatatacttttgctgcacacagaaaaccaagacaaagatattttactatctattgcagtcacaaataaaataaaaataacaaccgaaacgagttaattttatctttttttaaatttattcatacttttttcgaaacttaaacaaataattcaataataatgggtgctggtgattacattatctactttgacaaccatggtaaggatgagttccacatatatgagggtttgaaagaattagcaaagaagtttgatggtgaggtcaagaaggattatgaaaaagtgcataagtactacgtgaccgttccagaggcccttggtgatggttttaaagaagcagcagatgctttgatgataacgaagggtgttaacgctgttgttaaacaacttgactctgaaaagtaaggataatgtaagaggataaccaataagtttatgatgcaaggtgtgaggcactgataatttgttaaaaatgcttattttttgtgttaagccaatcctatgcactattactattgtctttttctctttctcttcttatcaaaatatatgtaaagtatgtttaatatctgatcagagacaagcaaacttttaatattctgtatgtaatgtttactttataatactactttaattaataataatttcgtttgattatctggttgataagtaggggggagggggtgtaaaatcatgatagttctgtggaaaaaagccttagaaacgctataaataggagaggacaagtaaaaagatctgtaagcaatcattttgaatatgttagtttctaatttgcgtgttatttcacttttatttatttgcttttttcgataattgcgaaatacatgaataaccaaacattagctcagttaaaactccaaaaataagatttcttactgtgtctgttaggttacaagcaaaaaagaaagttcccagaagaactgttgtttctacttctttcgatattgtaataacagactccgaaaaaagaaaagaaaaagacagtactgtgacttttttctcctttagcctatttgtattttttttttgttttgttgcttctcagtttcccgctttactgaagatttcattaacaaattgataccaactttcctcacagcgcatacaagtaataatgggcaacccccaaaatttaaggtaaatgtatatatagtacctctgtatttattgtgcaaccattaacgagatcttgaaatatcagcaccttccatacagcttctttactcaaatgtaaaagtagttcacttttttatttttcttgtttatttacatgtaatttgttctcttattttattagtgataactattctaaccaaactcaatagacgatcttcaaagagtaaacgcacaatacaagtggaaataaacaagaaaatgagtactacacattatattcttcatcttaaacacaataatggaagcaatatcccagataatcttttaaatgatataaaaggagtagtctctaaatttgatggtaaagtaaaggatgattttaagttggtgccagggtttacatttagtttaccaacaaaaataggtgaatcatttaaaaatgctgctgattcttggggtagtagaaatggcgttacagttgaaatcgaacaagatcagcaagtccatgccttatgagtcactgcacaatattcaatagcaattttttatttctatcctttgtactttttcttctttttttttatataacatgtagtgatattcttaaaaacagcttcaaattttttcccttaatatatgaccgttatctacatataaatacatacataatatatacacttatattatatatatataaatatacatatattgataacaacaaaaaatcaaaccttaatttctgtaaaacatgaaaaaaaagtcatttcttctcatttttttcagtgaaaagtatactaataattttgcctggagttgttgactaaattgattctaatcttttttcaaaaaattcaatacaactgatgttcaatctgttgatagcttccaccaaatcctctggtttatcagcaaaagaaatagcagttctgatcaaaccacaatgatccttggacaactctgtatctaaagccattttgtaacccaagacaacaccaagaccgtttttgataaaatatttctcaattctgttcataccttctataacagaaaattcaccgttcaatgaatcaaaattgatttcaaaatcaacaaacataccagctgaaggttcaattaccgaaaaataaccctttttgaaggactcactttcataagctgccttcaatatatgatttcttctatttgtatattctttagccacttgaataatccaatctaaccatgcctccaccattggtttattgtctcttttagatatagtctgtaatgttgaatagactaaagattgagatacactacttgcacctcttgtactaatgtcggtataatcatggatctgcttaatcaaatatttgttaccactgataaaacttaatcttaagcctggtgaaaatacttttgaaaatgtttctaatcttaaaaccctaccgtcatcgtctaatgacaaataggatttaatcataagttcttccaaataacgttttctagagaactcatccattgcatacaaattttcttctgggttcaatctattaaatttaggcattcttaaatagccatacggatcatcttcaatgatgatgaaatcatgtatctttgccaattcaataatcttttttttctttttcatataagtggctacacctgttggattttgaccagtagtgactgtatataacaatgttggtttgggtaaatgtttataaggaccagtagaccaattatctaacaagtcagacaaatagtccacatcaacaccttcatctttaatatcaaatggacgatctatagtatcttgataattattttggttgacaacaggaatattcaacttgattggaattgccttagcgccagcaccatagactgccgataagacgggtacaaaagtaaattcttctaccatgactgttgtattttcatcagctaaagtttcaaagattttaaataatgaatcgtttgaaccattggcgataatagtatcccattcttcatacaatggctggttccctacactcttaacaaaatcttcaataaaatctagtaaaggagataagcctttagtatcaccatattgtaaaacgaatggtagattcatctcatttgggtcttttttagtaacagaggcaatgttatgagcctctttcgaatcctttccatcaaagggatgatcaacaatgtgtaaatccattgacttaattgggaaaaaaccagggtttggcaaacccaaagacaatggaataagatcatcttttggtttcttggattttagaaatgaatcctcttctaaattagagtattttggatcaggaagccaaaaagtgactaatttctttcttaatgaattttcggatataaatttagaataatgattttctaaatcctggtatgttaattgagccatgatttgtgtatctttcttcgatggcaatttacaaagctaatttatttcacaagtgtaaaaagaggatatgtaaaattgttacatattatagtccctaatagtaattatggatatagaaacaaaaactggcaaacggtatgtgcttaaaaaatacaaactctcacatatcttatctcatttatcgttccaataagttatcaaatagaaaaaaggctttgacataatatctattttgccacataatgaaaagaaaaaaaaatgtttttttctcttactaattctggttagtcaaaagctgtctaattcggaggaaacgaaaaaaataaaaaaaaaactaagaaaaggttgtaaaaacggtagaatgaatgactcagagaaagttacaaagatgctcgactaaacaataaacgacaaatatatataattatatttgacaattcaagtcgagttcaatatatgggtaacaaaaaagtataaaaatagttttttatgaatctagaaatggactaagtaaatatatttatccaacagactaaacaaccatcaaaggagttaaagaaaatgtgggcaaaaaagaagttgagtatataaaaatgaaaaaaaaaaagaatttctttaattttcttttttactgcactattttcaattaagacctcaaggtacacaatttatattatcataaccatttagcggtgcataaatctttctttgatcttttagaatgcagaaagaagcttggttaaggttgtggttgttggtgaatctacctatcagattaataaacaaaaatggtgtaacaaaaagtttgttagtgttagatatatcactgataatttcttaatattattctgtaataatgcacatttttatctatttttaatgaaatttacatccagtgtattatatttgacattacatgaatggctggaacttcttaactccatacgaaaaacatcaaattacatacaaagtagtgtagcaaaatattagtttaatctaaaagaagtagtcaacaagatattgaaacatattcttgatatatatattgatttaccagagaatttgtaaggaaaatctgttatctacaaatgaagtacgcatggacaatttgcgctaccaacgcacctttttgtctgcagggcaatagaagagaatctttctttttctttattttcctcgttattctaatttcggagaacttggtagctaaaagaaaaaggaaaatcacccaaaacgaaggacagactattgttaagagtgcggagaagagaaacgggaaaggcagaaacaaccggagacaataagggaagactagtggcagccggcagaccacgtgcacgtttatggctgaagcagagaacaggcaaaacgatcaaaacatgccatatgactgactgaatatgagaggaaaagagattgggactcttaatcattctgtgatagtacagaatcctttatgatttgtggagatgacttatggagaccacgttttcggtttgcctgttggtttgcttgtttatctacgaacatgtgtgcactacacacttttgactctttaaattaatgttaagttcttatcatgacgtgaaaaaactaacttacactgctttgtacatgatagctattgttgtctgtcaattaaggataaaccacgtttctctcattctacacatatgtaaagcttggtggcaatactttataaactatatccaaagataaaggaatgatttataatcttttttaaacccttttgtatttcaagaataatatgttcaaaaatttgttctattctttcatttctttctccttctctccatgtgacatgtgttttttgggtcttcttcttgaagttgtttcaacctgtaaaccccacatttcttaccattagtataatattatcctgcatgcttgtgacaatatttctacccttttatataatctacattttggcacaaaatcatattatatatatatatatatgcacatgtataattgtaaagccttttgtttagatactgataaaatacacaacagatgctgccctatgatttaacgagagagtctatatcaacaaagataaaaataaataccaacaccaatatatacatatactccaaattctcaagaaaatatttccacattaacacaaaataacagacaatgagtaccagtttagagaaagatttaacaacccatgatgtcagaagtatctgcagtgatgatagttcctatttagaatacaccccattaaatagtcacatggacaccacacacaacattaacagcatagactacatttcaactcgatctgcgcctcgtagacattccttcacagccactattccaaggtacttccaactagaaaacattagaaaagctttgaataaaccatgccataattcaagaaggttgaatcccacactatatcattcattggccaataatcaagaatgtcaattttgccataatccaaataacgaaatggaacatatctatgattcatataatcattatgaacaaaataagtcgtataggcataaaatagagaacgttaatcaaaaaaatttgaaacatattaaacatcaggcaaccaaagaagaaattttattaaatcaaaagatgattgatgatttttggctggaaggtaatatacctgatgaaatggattttgatgtttcaagtgatgaagaggaggacacaggggatagtaattaaattaacaaaaaaaaaacatattagttgtaataataaggatagtgatgaattagaatttgtacaaaaaaatctttataccaattttttgttgtgtaaaatactaaatttgaacattcatatcagtatacgcattttattttatttcattttttcctatttttatatttttgttacttttcctttccatattcgcatataaaatcaatacttttattacaaatatagtttgcactggttgtataatatatttttattcaataatctacaattttttctttgtttgcttttttattgataaatttttatgtattaaataatttacactaataaaattaccttatttatttgtgtattcctataggtagtggtcatttaaaagttactcttctttctgaaaaaaaagaatactttaaagaccttttaaatgatgtcgggattttaatttcaagcaagccattggaaagaaagaaaaacataaggttttggattccttcgatttatccaagattttattataaattttagataagcaacttgtctactatatttctaacatatttttaaagttagaaaggtaaatacttttgcaaacccactcgaaaaattgcagtaaaaaaatttagatataacaatttatttgtatcttcaagacaatcgaacaaacattttagaatattatttattatcaatgaagtattaaataatgaagcacacgcatatgttaaagcagtccaaattgaatactaaatcactgcaaatagtaacaatttcaaaattggaaataataatacagatcataataataccaaaattacaaacaaaactggtaccgaaataattgaaaaagaagaaaatagagaagatttaagacatttacaaaatctgaaaaaatatcagttccaacatgaatgctcttaaaaatgttttgacaccattcttgttgaaaaaataatatttttaaaaagatacaagggactgcaaacgtactaatgtggatcgactggtgtcattgattggatattttgtaataagttgggatggtatagctcttgtttatggtggcaaaggggcaacagttcaaaaagtactaaagaactgtttgtgcagcttatatacttatattgtgaataaattacatatctataaaattaaataaacaaacaaaaaaaaataccaccaaaataaaagtttgttttgttttcgcgtatttcggactcaacagaacaaattttttagcatgtaatttcccaaaaaggaaatattttgacatgttccaaaaaataaaaacaaaaaaaaagataaatgaagcaaagcaaaattaaatgatgcggatcaaatgtgtaacaaacaatttctgaatgtcatacagtgctccagagtacaaagatgagtagaaacagattgatgtctaacttatattagcatagagcaagataatataaaagacttaaaaatttcttttatccactctccatacagtaaaatcaaaattctctctattcaattactaaaaagatcaaaacgatcctacatgactcaacattaatcaattttagtataaaacaggtatttcatcctttctatttctccccatcaattgttaattgtttttggtattatcatatctctttcttatcagtatttttaggacaaaatacagaagaagagttagattttgtttatgtaaccttttgaaaggaaattttatttttaaccaaaggagccttctcattatttcttttatttcttttttacattattgctggtgttctttatcattcatctattgctttaatttctttttatctttttttattttttcactaatttacggtacttggactttaaaataaatatctatcaataaatactcatttaaacattattcaattcattacttttaatcaagtgcttattgggttgtcgataattaatgcattttttgcctttggttgccttttgatctcagtaataattaaatttggaaaggatataaaacaaaattttaaaatagcactaataaattctaaaagaaataacggtaacaacaacaacaataaaaatagtaataataatcataatcataatagctataaagataataccatgaatagccataacattatagcagttaaccaattgactaatattccaaataattttcaatccagaacatctacttatttattcaaaaataattcatattccagttataacaataacaacaacaataataattatgatagttatccaaataataatcaaaatcgtagtacaaattccaatgatggaactattgtgggtttgcattttaaaattggcaaaaaaattggtgaaggttcctttggggttctctttgaaggtgtcaatatgattaatagagcccctgtagctatcaagctcgaaccaagaaagtctgaagctccacaactaaaagatgaatatagaacatacaagattatggcaggcactcccaatatcccattggcttattatttcggacaagaagggttacataacattttggtaatagatcttttaggaccttcactagaggatctttttgattggtgtggaagaaaattctcagtaaagactgtcgctcaagttgccattcagatgataagcttgcttgaagatttacatttgcatgatcttatttacagggacattaaaccagataattttttaattggaagagctgggcaacctgatgaaaacaacattcatttgatcgattttggtatggctaagcaatatagagatccaaagactaaaattcatattccgtatcgcgagaaaaaatcattaagtggaactgcaagatatatgtcaattaatacacatttaggcagggagcaatccagaagagacgatatggaggctctgggacatgtatttttttattttttaagaggtcatttaccatggcaggggctaaaggctcctaataacaagcagaaatacgaaaagataggggaaaggaaaagaataacaaatgcatacgagttagcccagggtctaccaattcaatttggtcaatatttagatattgtaagaaatcttacatttgaggaagcaccagattatgaaggttaccgtagattatttgcaacagtattagaagaaattggtgaatgttgtgatgggaagtatgattggtttaaattaaatggtggtcgcggctgggatccgaacattaacaagaaacccaatcttcatggatatggtcatccaaatccaccagacgaaaataaaaaacagattaatggcatatcactacaaatgaagtcaagacaaacacaacttggtcaactcccattattgaaaactgatcctaatttatttcaagcatttcaaagacaaccaccacaaatattatctcaaccatatcaaaaatgtgatcctttacaggacaagtatatgcaacaacaacaacaagtgaaaagatatccacgaaagatagccatgacacaactatacgataaaagtaatcaaattaatgctagtaatttaggagaaacttcacctcatcatgatagttataacgccggtttaaagggttattcaactcaaccaataaatgggcatgtttttgcaaaacaaaatcgacatgaaatgatgacagaacaacaacaaatgcaacagcagctgttagatgatttaacggaaacaaataaaggtttttttgctaaatttagttgttgttgatgaaataattatgtagtatattcatatgtatatgtcaacatgcatcatctgatttatactcttaataataaaacatatatgaaagaatagtaaatttgtttttttaaaaatatatgtagctaggttaagtctataaagtctataataggttcttctttagcccgtgtactactggaactatgaagaaaagtactatgttcttctccttcatcatcgtcatctgtagaaatatctgagtctataataataatttcttcaacctggctttccattaaatcatgctgggacaaaatttcctgtatatttacattgtcgtctgtattattcttttcactatattcaaaaggtaacgatctttgacctgattgtttttgcaatctttcaatagcagctttagcagtcatttcttttggtgttaacctctgttttctaattccatttaaagatcctaatttttgcaaacaatcactactattattattaggaatagaagtagaagtgaaagtaagggtagtattagtatcatttttgcttatatttattaatccgttttgcaaagaatgtattctttgttgccgtatattatatttaccaccgatatttttgccaccaagccgttttcccacaccaagaaagttataagttaaacccaaagtttcaatgatatattgtctaccacacaattcgttcatcaatttcttgaaagcagcattatgtgggccgattttgttatgtgtcagttcgtgaatcatagtatttataatttcgtctctggataaaaactgggaatcatcatatggttgtcgcaatcgtagcatgatcttgtacccatggttaaggtttaatcccagtagatttttttgtttgggataaaattcagctaagacggagaccttgagtccattttcgtccatcaataatgctactgaattattaatatcttctaatagatgaaacgcatattgcgaatttggtttatttttcaaatatgtaattgcattgatgtgaggattcttcttaatagtcattccaacctctaacaacttaattcatttgagctttgtgtgtgtccaatatgtatttacgacacctcaatccttttctcttttttatttttcttatttgtttgtttgcttattcatttaacgtaggcatctcttcaacatagagatggcaattagacagggatgtgtacctatgtatatctatatatgcaagccattcataatcatctcaacttcaaactgcatagtttgaaaaatctttgtcagccttcacttttttctctctccgccaattggagtttgcgggttttgtggacagataaaaaatattaaaaaaaaagaaagaaagaaggaaagaaagaaaaattagtagaaaatatttcctttttagatacttatttcctaaacaggaaagtatacatcggattgggatattgaattttccgttttttcctctttttacgtttggttttgttttgtttcgtttctttttctgttttcctgtgtttacaacacatataaatatgaatatatataaatatgtatataaatatatatatatatagatatgaacacataaagttgtgtttagacaaatacatacaacatatacatgtgcatgtacctacataagtaaatagttgaataatagttgaataatatttgcataatatttgaaaaacaaaagaaaaaaaaagataaaacaacatcaacaaaatataatttgaaatatgaaacactcagagagtgaagtcactttaacaagacctgcattatactccatttacgataaagatgttaccaacactgtagaagattataaggtattaaaacaaaaatttatcacaccaagtaagaatgagctgtccccacataaaaccatcaaaatttatcaacgtgtcctatattttttcgtgtcatgtagtattttgttttggatgggtgtaatgtttgcgaagttatctaccgagctatacgacaataaatctttgaagaagtggatgctgtcatataccctagtcaaatttactcagtggtcaaatacccaattaccattcccaacttatgttgtgtatggtatcttgggtgtattatgtggcaccgctgtaccaatattggataaatttctactaagtgaaaaacagactaaaccagacacagatttaaaagctgtactaaaatgttttaatgcattatttggcatatgtttgggtattagaacaatccaatggtcctcatctttacaagcctctagtgcgtggggattattgaacctcattttatggctatattttgatggaactctaagtgtattgcttttgggttctcttataagtgggattagtgtagccgtcacttatctatctatgaatattaacgagagcgtgccatggttttatttattgtatattgtggatttctatttcctaagttatttagtctttggcaagacaggaagatatctattacaataaatgtcggtgaatggaagaaataaaaaaaaaaaaagtcaatcagttaattaatcaatcaatcaattagttaatggatactttatttatgtatagggtataaaacgttaaaacaaataactatatatatagatgcataaatatacatatatatgtatatatgtaaatgcttgttcataacttataattatggaacacagattgattgatagggaaaaagacaaacataaagataattaccatttacgttattgttgttattattttgaggagaaaatggggtgcttaatgtttatcatttggatggagattttggtggtggaccactcgatatactgccctgtctttcaatttgatttatggtggaggaatcaatacttccagcactattacttagtcgtctttgtataatcgatttcctgagtcctgacgggttggtgacaggtaaattattacttgaatgctggatcacatcattggacttctcaacgcctgctttgcttaatgcataatcaccactatcgaaatactttctttcttgcattttatgcttcagtagatccttcttcgatggcaacttcccatataatttatataacttcaattcttgagttgttagtttactaacgtcgactttgttaccgtcatcatctttaacaaacctttcctttgtcaaatcaattctactagttgttggtgaaagttcttctgtcattggttcaaatatattagatgttacttttatgaagttagatcttttgtatttaaagtaatcttaactagaagaatttcgttcttttttcttttcttttcgtttcttttctttcctttatctattctcttccaagtgcaaacaatcaagtgatctagagaaacgagttcaaatgaagtataattattttctaccagttatttataactgtttttggtttttgttttttgtttttttttttttttgtctccgtatgtaattgatgtcagttgacttgatctatatacaacaaatactgtacccgcattcaacccgtaattaaaataagatgggaatttcgctatctcgtcaacaagggaaacgaatagcgtgaaaaaagaaaagaaaataaaataaaataaagaacaagaaaattaaggaggaatcgggagggggcgggaggaaaggggatgaggatgaggtaaaaacggaaggagaaggagagggaggaagagttgagaggtaaattttagtgtttttcttggaatgtacaaaaacttatgtagggtttggaagcttttacctctaggtctagatctaggttttacactcatgcagttaatgttatttatcaaatttttcagagtgaatctttctatcttcccttgctatatgtgtttgtgtgttttttctttaatgctgatggtaatacatacacaagaataagaaagaagttctagaagattgttagcagtaataatcacttttttcttttttttttttttttacaagtacgttctttgtcattttatcccacgtatcaaaagtgagtcaactggatttatagctcattttttctagtatttattattctgatccagtgaatcatttattaagcaactggatagagaaagatgtccattgtacagaaattactattgctgatacctttctttttcacattgaatgcacattgtataaccaaacatactgaattatctcctggtaattattcaaactctggtgtagtcagatgccactataaagttaagggtagacatctttccaatgatcaaatatatcaaagattaaacaaatattctagacatatagatatatggactaataatgaccactttatagattttcaaacacatgaggatttgtttaaaaaaatcaataagatctctaaaacattggatgctaactgtgaagtaatgatcgataaattagattctctaatcaaagaaagcttcccaacaaacagaagagatcatgggttatttaatgaaatattaagagattatccaaatagaaatgttgatatcttcaaagtaatcaacacaagaaatatccatggtaaactatcagaatactttttccaagactatagagatttaaattcactggaagtttggttccatgtcttaactcaatggtttccagatatccttaatttacaagatttgggatccacttttgaaaataaccatctctatgcactcgaaatcaacgtaaataacaaaacttcaaacccagatggaaagactatagtgataacaggtgggacccattcacgtgaatggatcagtatttccacagtgtgctacgtaatgttccaattattaagtgactacgagtcgcgtataaataataaagcaaatcatatcttcaattcattcaattttatttttatcccagttttgaatccagatggttatgaatatacttggaccacagatcgtctttggcggaaaaataggcaagatactgaaaacaaagaatgtcctggttttgatctagacagaacctttggctaccattggcagccaacatgggaatatccatgcagcagtaattataatggcaaagagccatttattgccaaggagtcacagttgttggatcagtatattaagaagaaatttggtccagataaagacgaaatgttatctgttttcttagattttcactcctattcacaagagatactttatccatttacatattcatgtgatgttttacccaatgatattgaaaacttattagagttggcgtacgatttgtcaaagagtattagaaagttttctgggaaacagtacgacgttagacaaggctgtaaagatcgtgatgccgatctcaatccagcagctggatccgggtcattgttagattacatgtatgataaaggtgcacgtatcagttatcagattaaattaagagacactggtaaccatgggttcctattgccttctaggttcattgaaccggttggtaaagaagctacagaagtgatgaaaactttatgtgatttcttattgaatccaactacatggatgtcataaaaatgtgaataagaagtggaataagaagaaacaaagaaactacttttattttttttttgttagcattgctatctgttcaatcaacattatatattttaaagataaaatagctccctcaataaacaaaagaaaaagaaaaataagaattgtcttgactatacatagttatattgataagaaatatagtaggatacaaaacacgtaacatatataaaaactttatacgttaatattcaatagttgtagacttcgcaccatatggtttgctctaatgaaattataatagattttttgctgttgattttttttttttctttgtttttgcatattgcgggaattaaaactcacaaactttcggaattattcggtttataagcctttcaataaaataaactcggtaatcacggaatggtcttgatgcatcgcggaattacttttttttatgcctatcaattagctttcaattacccttttgagtttattttgagtcaaaatttaaaacaaaattgaaaacctagggtccaggcttaattcattatatatccaattttatatatacacttgtaatagaaacgcactcctgattagacaacaccccatgacagtttttctgtgtttattacctgttaccatatttactcactattcctgtcacttattaaaattgaattattcaagttaaaccattcaagatctctatacactttacacaatagtctaagaactcgttgtaattattcttttatttttctttctttttgtacaggctataaatattaccatccggtactgaggttatagttagtgttatcaaacttctcattaactattcctattgttttttttacaagaatttatttgacgaaggcgaatcattattgagacaaaaaaaaataatatatgtttggataaagagaaaggaactattgaatctttattatatttatcgatctcaaaagaatcaaaagcaaaagtcatatatcttcatatttagatattgaaaataagaaaataaaaaaaaaaaaaaaaagaggaagagatagactttatctttttgtttgtattccttcgatgatgtcaaagattatttcgccagatatctccttaaaatgcaactatgaccccagaaataattgtcaagatgatcttaaaactagtatagattccatcaaaacacctttatctggttctaattcttccattttggaatatatttcacttcaaagcagcaatgtaatgactccacctagtcccatctcatcagaaaatagtttctcaaatttagatacccatgtcaatagcagaagcgattgtagtaataatgtagttgttagtagatcaagtgataaaagtgctagtagaaatagaggaaccaatataggatcttctaattctaagaatagcaagtattcagacaataaaaagcctattattttcaaccctatactggagaatataaaagtactagatgctactgaatcaaatacaagtgaaaatgtactttcagaagatatagaattaacaaaagatttattttattatatagatggacagccttcacatccaccgaattatgatgacatcaatcctgttagaaatatcagacttccgatttatgaaaatactatgcctgttgataaaaatgaaaaacctccagaatatacaccaacaataaataagattattatagtatcttttaaactagaaagagtatcaccatatgaaccctctacatcacgattatggaaggactatattatggaaatcaattctactcagttaaatttttatttaatcaatgatacaatagccgataaaattaaaacattgagaaataataaatcagatcgctttcttaataaccatgcaaatactaataataaagactcatacatcttatcacctaagataaaaaaatctagtgcatttttatcaaaactgtctaaagaaagttatacatttgatcttaatgaaaatgagcaagaaaaaatttgctcctatatttatgaaaatagatctaaatatttattaccttcaaatatctttaaaacctattctttgcaatatgctaaatatggtattccaattgattatcataagaaaccttttgtcttacgattacgctgtgagtcggaacaatttcttattaattttaataatattgatgatatgattatgtggtcagtgtatttatctattggtatatcagtatcattggatttagaagtgcgagaattaccaaactatagggttgtaccaagaagacgtagacgtcatagacgtcgtcgtcatcgtcgtcatcaccacggttttagtcatattcataatcgtattcatttcgaaggattgaatcacgtaaaagtaaatgtagcgttaagtagaaactttgaagtgtcggcaaattcttcaataccaaaaaaatcaagatcttacagtttaagctcagtaagggtcggcctttctctcaataacactaattataataataatcataatcttcacatgtcaaataacattacaactttatttgaagaaaatattacaaattttacagagtcacataataatactcaagttattgaaaaaagtgcaagtccaaatagtcacttaactagaacttcggatacatttatatctcataatacttcaccatccatcaactctacatatgatttgaataaatttaaaaacaacacttctacttcaacaattaatgcgtcgtttgtatcaaagatgagaaatattttcaaaatgaagaaatcattttcagaattaaatgacagtaagactattaaacacatatcgtccactaatctttctaacgatagctcaatgaacaataagaaatatacaagagttagagcaatgtctacaccatctatttcaaatacccccaaaagtcataattctgctgataataaaaattctataaacaaaaaatgtgatcacaaaataccagattccagaatatgtgagagaaagattaccgagaatcttatacaggagatccatactcatcatagaatgcattctggaagaaataggactgaaaacacttttgataattatgaagacaataacgaattggatgaatttgataatattgatagtaatttgaccgatgaagatgaagatgaagatgatatagataatagtaacaacgatatgatagtatttaataacaatgaaggtaacgtatcaatttatgcggaagaagggtattttgatgatgaggatgaagatgaggaggaggaaatcatggacaattcaatatcaagccctataataaataattctagaactcatttaaatcagcttcccatgtctattgaggagtgtgtgtataatgaagatgatgatagaaaatggcaaccgaataaaaaagaaatgtcaagaaaaagatacataagagactctttgaggtgtatcaaaccttttgtagaggatcaggaatggatagggcatgttgtttttaggcctataaaggaaccttcttttaagaccaataatccacctatatggactggaaataatgataataggaagaaatttagatatttatcaagtagtgattatagtaatgtaaaaaatcattatttgaaaccgtatattgtgggtccaataggtttcttaaaggctgaaactaaaatagtatcacagtttcacccacagaattagtgctatgattattctgatttttttattaggagaaaaagacaggagatattatgttgttaacagtaaaacttaattatttatatatactgatacccatctttacattgaattatcttcattctatagatttttttgttaaagtaatatatttatctaattatatatagtaatttgatgttgattagcttagggctgctttaatagtataatcataccttgaaggtggtcattctgaaattgaaatgagacattaaatttactagaatttaataaaaaaaactctaatagaaatatcagaaaaacaaataaacttttagatgcgttgtaaacggttggctaattaatatacacatactcatatttgttcatgtataaaaatttttactatgtgcacaagcatggtaaaataaccaaaagatgtatagtggttttcaagaaccactctataaccaacctattgttatcgacaatggatctagtgtagtaaaagctggatttagtggtgaggataagccaaaagtcttcgaatataatattgcaggtaaatctaaatatgataaggttatgcataacgggttggctgatgaggcatatgtggggaatagagcacaaaaacatagagggatcttaaaattaagaaaaccaatggatcgtggtgttatagaacattgggatgatatggaaatgttatggtctcatatttttgaagagtctttacacttaaactggaagttgaatggattagaagaatacccattattgatgacagaagctcccttgaatcatattaagaatagaaagataatgtgtgaagtattatttgagaaatttaattttgatgctttatatattacaataccaagtgtcttgtcactgtatgccagtggacagacgacagggtgcgtagttgattgtggtgaaggctattgttcttcaacaccagtctatgaaggatttacattgaaatctgctatacgaagaattgatcttggtgggaaagatctcacagagcagttgcaattttatattaggaagaccaatgggatttcattatttaccagcagtgaacaagaaattgtacgaactatcaaagagaaagcaggttatattgcattagattataaaacggaggaaatggaatatgaagaagacctttcagactccaaaatggctgaatttgtattacctgacggacaagttgtatcaattaaaaagggaaggtatagaatcccggaaatattatttaatccatcaatcattcattctgagtatgagagtatatctacaataacatcacaatcaataaatctggtagatatggatcttcggcaaaatctaagatcaaatattgtgttaagtggtggtagtacaatgtttaaagggtttggagagcggtttataagtgaaatgcattatttatccaaggatctagattcaaatattagaattttggcaccaccaaaaagaaaatatactgcatggataggtggttcaatttttgccaattcgtttgctttcaagaaattgttattagacaagaggtcgtggattgaagatccgggtgtaatctctacaaaattcctatgaaatagaagaaatatatcatgtgtattatgtcatagagaatatttatatagaataatatcctgagaaaaagaatcactgatagaacaaccaaaaaattcttatataaataaagttgaatggtatagcctccctaatcttcatactacttctcttctatttcatatcgcaatatcttatcctattcatctgttgggttacactaaatgtatagatgtcgaatgtaaaagttaggactctttatattgttgataataatttacagtactaaatacacaaaaatatcctattaaatactttatatattatgttaattggattcttgttgttgtctttttctttgcttgtttattgctattattattattattatttaactatttgaattaaatacagtagtatctgtcaccgaagtcacctaaacctggaactagatatttctgttcattcaaacctttatcgatacaaccagtaacgattttaacatctgggtgagctctatgatagttatcgataccttctttgcaacagattaagttcaagaaaaagattctctctggcttaacacctctttttattaatacgtcagtggcgatgattgcagaaccaccagtagctaacattggatccagcaaaaagacgtatctttcagaaatatcatcaggtaatttttcatagaacaattttggtatagcagtttcttcgtctctttggatcaatatcttaccgattcttactgatctgcagcagtctcttaaaccttgttccatagattcaccggccctaacaattgagacaccacatattttacctttaaagccaacaccactgaagtcttcaccagtgtgggtagcaacagttttagggatcactggcaaatgatttaaaccttcttcgactaataatctaataattctatcagaataaaaaacaaaatcagatctgacagtatttttatctctaataatggtataaagaccagttaattgatttgtttgtggtaaaagacaaacgttcttaaatggttcggaagacatttttttactatgtggatgtgtattttaaacgatgtgagattctttgttaagaattaaaattaattacaaaaagtgcaaaaaaaaaaaaataatggtgttatgcaaattatgatagtaaaaccaaaaaaaagaaaaagtttaaatgattactttaaataaagtatgtatcaaatgaacaacaattcggtttgaccctaggatatttgaaaaagaaaaatgtgctttaaatataaatatatttaaatctcaaacaactttttgatgatttgtaaacgtatcaaattgtcttgacgataatttataaactgagatgaaaagaaggtgaaaagtgcgaatcatgtaattaactttttagaacaagaacaagttggatgttctatcatatatgtatatatataaaatgagctatacttgtttaatataaagaaaatgtgcgatgaggttgaaagaaaaaattttcaactgttattcttttttttttggtgccgatgagcttcaaaaattttttgagacaaaaaaataaaaaaaagagagagagagagagcattcattgcctaattaagtaagcatatcctaaataggtaattgcatcttagagcctttctcacggggatacggcgataccaaattggtttaaagccctaactaaccctaatttttaactatttcatctctacttaaaaccgtattacattgaaagaaaccacaagccatcacggtatctatcaaatacatttagtagggtagcagttgataaacaagctggacacttaaagtgtaataataatatcaataataatataagcaactgtttattattgagaggaaggacgatataatagaaagaaatcgaaattgaagagctatatttgttatatgtatatttattagaatatgcggtctattgatagacatagggtatctatggattatccaagtattatatgttattagtttttttcttattatttttattttttttatcttggtgtttacttttgtttatatatattatatatatttaaattcatttcatgtctcattcagagttttgcatatagataatttctgaaccttccatgagactgatagatgctaaaatattacctcttataacagtaaagccaagagatctagtcttatcctttgaaattttatcattagaatccctcatatattcaattgtttcatctaaaactaaattcattaattgatcataaccttttaacacaccgactactagtcttcctcccatcaatttaacacgaacttggtggtctttatattttgccaaatctaaaatggcttctcttttaggactttcgaatttctttttttgttgagattgtgagaatgattgtttcttgtcttgtttctaagaaataaaacgaaaggtttcaatgtttccaaaaataattatcaataatatatattgttagtattcctagctttgttagattatcaattaaacagagaatagccattaatgccaatgaaaaacctaatacatacagtttcactcatgatctttttatatatgaatataaatgttttgaaaatataatataaaaaaatgataacttctctccctagcaagcagataagttactgttaacaatttgtgacaaaacctttcttgtagatctattgaataatattatcaatttgttcaaatataaatccacttagttttattatggcttcttttgtttgtttgttcaacattcattttatttcttttttttaccttttagatatcttcaattaaaattaaaaaaaaaaaattgatatatttgccatagaattatgttcaattcaaaaaagaacaaactacttacaatgggtaaatgactagtatcctatactttgaataaattagttaataaaaagccattataaaaactaagatattaaataaaaaacataactaaagccagtgaaatcaatttttatacacatgaagaatatttttattgagtctgaatttgtatccacctcaaaagactttccaaataatattttatacagtgagttatgtgaaaaattatataaattgactgggattgaattagatgatatgaatattcaagttacatatacaagtaagcctaatcagttgatagatttaaatacatcgagcccaactattgatttatcaaacgtagaaaaaattaaagtcttggatacaaatgagaattctctgataaatcaattaaaaagatcgaaaacaagtaaaaataattctaattataataataataatatatttcaattgtcagaagaagactacttgaggaaaaaagattctgtattgaattggaaaaagaataataaattaggcagatttgaccctgtatataatgaacaattaaagcaaaatagattacgacagcaagaacaggtacaaaacctggaactgaatcaaagatgtttggtcaaatcttctactggtcctcatacagagagaagaggttggttaaggtacattggaaaaattccagaaattaataatgatgatatttggtgtggtattgaatttgataaaccatgcggtaagaatgatggttcaataaagggcaaacaatattttggtccattaaaaccaaactatggcgggtttgttaaacctctatgtgtgttgacagaccctaaatatattccaactgttgaagatggcatatcagatgaggaaatatagatagacttatccacttttttattgtggtttatccacatcaaatcaagtttaactgataaaaataaaaagaaattgatttaataaactaataactatctagagacatattgcgtactttaaatatccttaatgtgtttttatacaatccaaatcaaacaggaagagaaagttgaatatatgctatattattactataatcttatatgcatatatggattatagtcttttttatgcatgtattcgtatatgtatatatgcatatacatacatgtccaatgtgtttttttcgtttaataaactggtacagctattgacacggaaattatatctattttaactattctaccatcaaccaatgcacaattagacatattatgtatcacttgcatccataataacgtaatgttttccaaaaaaaaaaaaaaaaaaaaaaaaatatatatatatatatacaattttaaaaccatttaagagatcttcactttttaatttgattattttcgtactatttaatcttctaatattttttttgcaaagactttcggcattggtactaatattcaaattataaaatattaaaattttgttttctgcctatgatactgtatcagtaattaatacactatggatatgtactaaactccactggactctttatgtaatcctctttatattgtttaattatttgggtaaatagatacttttatacaagtatattctacagatctattttggcgtgtatagcagcagctcagctgtgaaggctcctctgatggatgatacgaattttctagaatatttctacttaatagttcttcaactccacttcaaaacaaaacaaaacaaaacaaagaatccttttgacatatttttcgaatcaaataaaaagaaaggataaaaaaaataggtgatcattcatagagaaagagaaaaaattattagagttaagaggtattttagtgattttatttttttaaatataagattttaaaaaagttaatacgatttaaatgtgttttattatatgattttacagggtatataaagaaaatggaaaaataagtagaaatttttatcatgcttcatgtaatgttgaatattattcaaaaagcttgtagcttaaatgggcaagatggcattctgataagacttatgagctttattactattataaataaggtaagtataacgaaatgaaggtctaccttttttaccagattatgatgaaaacattttggaaaacatttctgaatatcttttccattaacttaatcacaccgcatttagaaagataaatatttataaaacttgtttgaaattatgacaggtattaatttagcatgttataattgcaaaaatacttcaaaatttaatacataaataaaacttatactaatcgctttgctttaagtgtgtttttttgttgggagaatttgatatgaataatggaaaaagtagcttgattttatcaattaacataaaaaatttcacaagttcaaaaaagaattcacctggaatatttttctggaactgaaaatatattcacataattaccttttatatcaacttcaatacctgtctgtgtatttgttactgtatccataattgtcatcgttattatcattatcattatgattttggtttgattttttgtatagagattccaatttttctctgtttcttcttgacaataccaatagacattggagaaatggatttttcgacaactgtcttatttgcaaaaccagggtttgtttttgattgattattctcagtcaatatattttttttgatttcgaactcatttattttattatgtaaatagttatttaattcattgtcttttttagcttcctctgctcgtatcttttgaaaataatctaattcttgcttactcaacttattaaaactttccttttttttaactaattttttgaattcacgttgtttcttaatagcattagcccttagttgttcctgtaatgatttcctttttcttctcagtctttcattctcgtacctcttctgttgttgctcttccttcctcttttgtgtgtcaatgtctgcagaaccttctgacacaaagaccaaagatcttttttttctttctcccctgttacctctatatagagtattatgagaatttgtggaacttgtaacatttaaattttttttattattagatatgggactagttgttgaactagtagttgtgttggtattattaacagtatttttgggagagccattactctccttagttatcgtgccatcactcattgcgtcctttttttaatacttcataaacaaaatgagatccaatctttttctaatttcttttttaaaaagaatattacagaatgtacgtaagtgttatacttcaccatttaagccatatactttgatctgcaccctgaggctttttaaagcacttaaaaagttactttgtaataaaatacaagttttttttttttgatttttttgtaatttttgactacaaagaaaatatatctagatttttggcaatttcaactgaaaaagttgttgataaattccatttattcccttggatttaacaagactgacagaacagtaactgatatctctgacatattattttgaattatatagagaatcatctgcgtactagtatagaacatgctatggtttttttatactgtttcagattgactgaaactatatataaatatataaagtgacagtatggaattaactagaacagtgttttcctcaaatatcaatatatataatctaagtttaactttttaagtcatctattgtttcttcagaacattgtgacccatttaataataagttatcgtttgtatagggaaataaatattgttggtttttgtctttgtttgtgtcagaataggatgactgatcaattgaatgatatctattatattcatagctggtgttgttatctttacattccatcattatatcgttaagaaaaatatcatctgaactgtgaaagtccatattctttttgccattgctgctgttgttattaatcttgtaatttttagggttatcagaataaagatgagaaaaagtaatattggtagctgatagctcattagtgtttaattctgatgaacttagctcagcatctttatctatttggttcgttgaggattttagtttgctgtcactgatataggcatgatactgaatatattttggattattatatattggaaaatgggtagagtataataaggagcctagtattactatgttttccctgtttggatattttatagattttgtttcgatgtctttaatgttaattggttgcaatagccgtttatcaggggacggaattattttaaaatttaatttgggataatcttgaattatattaccctgtctcttttcaaatatttctctttccaattcttctagtctttggatattgatgagtttagaaacgtttttatgttcagaaaatgttttttctctcttattcataaaatatggtatttttggagtttgtaatttagtaggtgatgacatttttgaactagataaacaaaactttgtattaagtgtatttattaaatttagatcatggatgtctctatggatatttttatctatgatatttttgatatttgatttgttttcaaatgttgctttcccattaattatatctttattggattctttcaatggtgatgattcttctaagaaattagtactaaaaaacattggttcaattttgttatcactgatggagagttcagattgttgtcctccattattataatttgcaggagatctacctcggataactagtggtggtgtcttaatttctattaaattaacaaaatattttttggaatagttcaaattggacatatgtaaaaattcaattccattggtttcctttaattcaatagtatttgggatctccactgttacacctaaaattacatacagctggaagtaacgtccaatagaattggattttctaattccactagaacagctaaattgaatcctttcaaattttgcaactttgtctatacatttagtaggatagtttttatacagtggatcgataatattattggtattatcctggtgcagataattatatatgttagggtcattagaatttttccctttatcatctttacaataaaaataaaatgctttttctaattctccattttttttgggacacttgatattagttatattccttattgtatcatgatctggtagatttgctggaactacaggacaaatctctggtttcccgtgtggacctttgtccctctttgcggtatgttgaactaaatttatttctttatcagaattttcaactttagacagaatttttattccaaattgtattatcttacaagttattaaatttccgttttcttttaattccaacgtataagaatcattgacaaattccataagatcagtgattgatgattggaaagaggctgccaaagtaaaatagtttcttttgtatcctatccattggttatcaattagatcgaatcctctatctattcttgatgttaaattgaagaaaacaccatgcttctgacttgttctgactatatgatcatattgtttatgcagtgaaaatgaaggtccgattttaaattgcagacacgatctaggggggatctttgatttataaacattgattttttgtttttgtaatggagttccagtatataaatcaggtaattctgcaatattacaatacttcttgggtgaatcttcttcgtcaagtttctgtttcattattttttaaaatatattaattcttaaatctttaaaataaaaaaagaaagttagcaatggatagttttgataagaaaagatgttgggaatgagcgcctttattcattggatatatagtaaacattctcaatattatattaaacagatttagtatacaaaattataataaagttcttcactttctttctctatatacaacatagaaataataatatagaaagattgtaaataagataaaaataatgtatgatgaaatccttggctttatatatgttaacattcagccattttcctctacgaacagtaagatatttaataaataaactcaacaacttttggtgacctctcaacaattattactcaacaatttatcgtttagtgtctgctaaaatcttattgttctatctattttatcatagaacattctatttcaacataccacccatagatcaattcaattttagtagatccaattctcagttaacttggcaaaaattttaacactcaaaggttttgtaagaatatcagcaacgttttgacttgtgttaatataattcactgatatattatcattttcaatttcttcagcaatgcgtaaaaccttagtaccataaaatttatttttgatttttgatatgtctcttactttgatttgatggagactagtttgactgtcagttaatattgaacacctgacctccttgtctgatatagcctgaattagaacatttaaatttcttaatcttggaattgcttcacaaattgaataaatttcactttcggtagaagaggtgcatgtaattgttgacttagatgacctagcaccaatcaaatttccatttagataatacatatttccaaattgtgatttcatatcgtgttgatttgcaaaagcagcatcagttacagcagttaaatagttaatgttggagttggacgtcttgtgccatatgagccgtttgttccttgttgaccaaataaactgaattagttgtttggttagactcatgacttgttttgatggatatagagtatgtctagctagcgtgttgacataatataatatatcatatctgtacttgtaaccgacatatgaagctaaaccgattgctttttgtagccatttcaccttattcttgtactcctgctcagtcggaaaaaattccctttctcttataatttcattaggtgttcctggaacttttctacttttattaaggtctacacgtagattcggtagtttttcttctaaagatttagccatacccattttcatggataatcctttaatatattctatttccagaccgagaacatcatattgattaatcttttgagcaccgtcattgacaactttggtttcgaactgtgattggagttgagaaataaggtcatttgttagttgacgattattagttaataataccatatcatcgacaaaaagacataatatcacgattgaatcattgatttttttataaaatacacaaggccatcctggtacaaaattcatatgacaactattaataataaaattggttatcttcttataccagtttgcaccagactgtttcaaaccgtaaagtgatttctttagtctatgtactgtatttcgtaatcctaaatggggtggagaacgaatgtacagttcttcttccaatggagcatacaagtaagcagatgatatatctaattgtataatatcatagttgttttgtaaagctattgatagacaggacattagagcgtaatggtgaacagtgtttgacatcagatctggttgataagtcgaagctttttgttggtctcccctagcaactaacctgcatttgtgatgaccatctcgcttgacactaaaaataaacatagagttaataattttggatttgtctacttctgtagcttcaatagtttttaccgaccaggtacccattttcgtcagctgagatatctctttatcatatgcttcttggaatttttctttttcaattggatccctattgtgtgtgattgcttgaaaatattgtaatggaccatgctggttgttctcttcactgctgacctggtttatggtgtggcgtgtagcagcaatgtaatttactgcatatgtttttgtagttttcctacgtttaccaatacgtgccttagttctttcgtccctgtctcgcttctgccgttctttggcatcgacaggttcaggcgtttctacattggtgttcttttgacgattaccagatcttgtaccacccaaggtactattgtcaacgtagaaattatcagtaggaatgggggtgagttttgatgaacgattactagatggtggtgtagatgaagatgtagatgaagatgtagtatcagtagagacagcagtgggcagtggtgatgattcatcagaagtaggatgagatgaaggttcaacaagagttaagggtagttgattaggatcattgatgtcgatgggagtgattagttcctctaaatcagaagaggtgggatgagtagtgtggttgttagatggatttgaattggaagtagtattggtggtgatattcaaatcagcatcagcatcattttgaattaaaattttatctttaaagagtggatctttgttaacgagggaagatgatttgggtgatgaggatagagtagataaaactgtatctttatgattatcagaaggtgtggcttcaatttcgtcctttgaagatgtagtatgttcaaattttgatataaaagttgtgatgagatcgtcgaatatagaatcatcatattcttcattttcatgaatatcaacgtcatgtttaattggaacaaaattggatgaggataccaccctacgtttagttgggaggtaaaataaatagccataagattcagcatctggtattagagcaaaacctttttcacctctgacatgtaatttggaggcagttttattgaggttaataatgaccggttgaccgaatggtagcagtgacttggtatcaagtcctagtaaaccgactttagaccgaggtgaatccctcatagaattgttatatatggaattacggattatagttgcatattgcacagcgtaataccataggtggtgtgggagttttgcactattcataatagtacgacaatcatttaataatgttaaatttaatcgttccgcaacaccgtgagcttgggaatcacctgcgtcggtataaacaatttgaataccgttttcagaaagaaacgtttttactgcagagttggtgtactctgttccccggtcaaactggaattttaatatgggggttttgaattgtcgctcaatagtcgcaataaaggacttgaggacatgtaggatcgttgcatcatctttcctttttagtaaataagtccacttaaacttagatgcctcatcagtgaacgatataaaccattcaggttttgtagccacagttactggtccaaacaggtcagaatgaatatattgaaatggtttgaacacctgctggtattgcagacgtgaaccaacaatatgtggtctcttcctgctttttcctttgagacagtcctgacactgaaaattgttaaggttagaccaatcaatttcgtctatagatagattattgaaggttttatttttgatggatgtatagattgactgaacattgacgtgacctaaaatgcgatgaatcatgtctaaaggaaatttagtttttaacgcatttacagatttacgggttgcagtagatggaaatacaatatgatgattggataaccaatgtaaaccctttgaggagtcaatgtttgctgcaacatcaccattagcatcttcaatggtgttgagacgctcgtttaaaaacagatggtgagaacggagatcactagtagataaaatggtgtgatcaattgtgggtgtgtaaaaggcatgaatttttatttggctgccatttaatgtttttagaattaaatcaccctcttgatcgtatgggatatccgtgttggagcatgaggttatttgaacagattcaggatgagagtcacgaagattgtgcaacatctctttatgttttacaagggtgaccgtagcaccggaatctagcatcatataatatgcaggatttagtgaagttgaaataggcctaagtaaggttggatcgactgggttattttgttgaggaatagaggtgctatttgaatgggttttaacttggctaacctttttagaacgagctttggtagatttggcttttggcttaactgttgaaggaactgtagtatttttggtgttcaacacagtagatgtgttgtttgctcgtttattcactgatggatttgttggatactgtttttttgaagaagatggaggattaggggaaaaatgtggatcggaaatttgtgaagcttgatggtagtattgatattctctcttgatagaagagaaaatgtcgtttatagtatatggggtatcactcttaaaaaagtgtttagaaatggattcgtaagtacctgttaacgtatcaagaattgtttgttttagcaggtactcgtgggtttgaagatccgtggggttcaattgatcaattaagttatggagataacttgtaaattgaaatgctgggtagccaccattatattttaaagatctaatagtgttgataatggtattgacattactgcgttcaatgtcgtatgtcatggcctgacgaataacatcatagggatgcatttgcttgtgaaagcattcttgaacccaatcaggataactgctctgaggaacaagggtgaaaaataaattaattaaaccttgagattcttctggcgttggatctcttacagtacgatcgtgtgaatcaggaaccaaatcttttagaccagaagcaatcaaatgttttattaaggaatgaacccaggagttaaatagaccaacactagagcagtaaaataaagtagttggaatgtatgggttgttatatttacatgaatggttaggtgaacctggaaacattggttggattggattgatgggagaataatatcccggtagttgaccataataaggaaatggcatataagcgaaaccagttggttgttggtaaccgtttattggaatatgatggtcatatgatggaccattagtaccagaatcaggataggatgactttccagcctgagaaggattgttcggcgtggaagaaccgtatggagcagattgctgatctggagaagcattgtttccagattccctagaagatgggtcaacatctgttgtagcatttaaattatgttccaactgagggttggatgggatgttggatgcagtggaagcgtcttgactggtatttatgttaaaagctttaataccagcgcccgtggagggatttacagcactaggatcactagtgtgtccagacagaaagctaccatgttgggaatgagcgcctttattcattggatatatagtaaacattctcaatattatattaaacagatttagtatacaaaattataataaagttcttcactttctttctctatatacaacatagaagtaataatacacaaagattgcaaataagataaaaataatgtatgatgaaatccttggctttatatatgttaatattaagccattttcctctacgaacagtaagatatttaataaacatactcaacaacctttggtgacctctcaacaattattactcaacaatttatcgtttagtgtctgctaaaatcttattgttctatctattttatcatagaacattctatttcaacaaaagagtacacttgaatatagtttctttataaacaaataagtaatgtgacttatagttttgacatgtgcgtataaaacatttatttgatttataaaattggtctctacacttttaaatttaaaaggttctttttttttttgtttgtaaccgccaaagttcaccacgaaaaaaattacaatgtttcgtcaaaaattttcataaatcacctaattattaaatggaaatattataaaaacaccataaaaattaaatccagaaaatataccaaaatatggatattaattatatataaacatttttgttgaaatagaatgttctaataatgaaatagatagaacaataagattttagcaaacactaaacgataaattgttgagtaataattgttgagaggtcaccaaaggttgttgagtatgtttattaaatatcttactgttcgtagaggaaaatggcttaatattaacatatataaagccaaggatttcatcatacattatttttatcttatttgcaatctttgtgtattattacttctatgttgtatatagagaaagaaagtgaagaactttattataattttgtatactaaatctgtttaatataatattgagaatgtttattatatgtccaatgaatacaggagctcattctcaacaatattccagatattaccaaagctaatgatcacgaataagtgataatatttttttcatatctattacaattaaaatcctccaagcttttatttttcatgtatagatataaatataacaatgaatataaaaaataagtatctaaaatttctaaaatacatctgtaagatttttttcattatattcctttccttgtcccagcatataaattcacttttgtgatgaatatgttactctcatttatctcttaaccatcattactttttacagttcatttccaaatatagactaaattattcatatgtgtttatctaatatttcccaacatacaaatatctattcaataagagtatatatacaattatatatcttttcaaaaatctcaccacataaaaaatataaataaacatttcaactaaaatgaaatccgtatattcaaatctttttgtgatgtttaattgtcaatgcatagatatccagatacgacgtaaacttatgaattatttcgttcataaaaaatccatggatccctaacgataaaccaaaacctaaccaacttaatgcatgggctgtttgttttgaaggaccatcaaatacatttaccacaattaaatataaactcaattgtgccaaagggatcattgtagaaatattgaacattggaaagtcttgcttggttaaatgatgcacaataatacgtccaacaacaaacgctatggttaaacctatggacgacatgaatgcaaatgataaaaactcaggttctatgtagacaataatcacaattgttaaataatagataaaaaagggtaataaaccctgcatggcttgcttaatattagccctttcatttagtaaaattttctctccactataatattttataacgtttgatcttgcggtatagatattaaataacaaaccaattgatgagaggacaaggaaaagatgtgatgtatcaaaaccaatgatcatgccattccataaagtaatattaaaaatattagtatgccataataaatctggacccattgtagcagtcaatataaatgcaaaacatattcccagaataccttctacaggtcctgagaattcacttaaaaataagatatgcgtatgatattcttcccaggtacttaaataaaaattacacaaaagagcaaattgactatataaagtcaaatatgaatatccagaactaatcatagatgagaagataaacagacagagagtcgtgttgatcgaatctatactgtggtcaaaaagttcaccaagtggacctgactgatttattctacgagcatgaatcccatcacacccatcaaatgtttggtacataaatataccaaaggcatgtgcaaaataaacccacctaggtgactcttgattcaagaatggatcatatatcattaccaatattacattgaaaatgacaaagccaagtcctgacaaagtaatcaagttcggcgccatagtcgacggaaatatttgttcaaaccataaccaaaaaggtttcaacaaatgccttgatataattgaacgatcttcgctctgatatctatattgtttcaaattttcaatagctccatcaggaaggaagtaacccattttatcttttatataatattaactttgtatctttatatttttgttcaacaggataaactcaatttaatagaaatatataaaccccagcatacagaaaatgtctgtaatatgattacacaatgcattaaaatgaaaagatgattatatgatgaaaattttgatccaatcccctccttctatatctgtgttgctttggtcctaaagagctgccattcttttgctgtagccatctcattctaaaacttcatcgagcattatttttttttcttttttacaaactccagattatttttcaaataaaaaaataaaataacatacaaaacctcaattaatttattatttttttatttaaacgtttcaccaagtgtagtatgcacaaaatactcacgaagtttcaacaacttatatgaagaacaaaatacttttaattctaatgatttgattagtagagggtcgggctgtctattttcttcactttaaactatatcaaaacgacagagaaataaaatgaaaaaaaacaaacagatatgcataaacgtatataaatgttacttaagatattagccaaacttctatcacggatgaaaatgaaaaaaccgaaaagaagagatatagggatatacagcaagacttgttatatttatttacatgtagataacatgtttgccacaacgcccaacaactgctcattttcacaggctgctgccacacgttctttatcattcaactgtttatttacctgattttcactggagtgtgtacccttctttaacaggattgtaattctaaatcttggaggaagggatctttccaaacgtaccctaatccctaaaccaatcaaagtagccaatgagcaatgtgtaatcgtgggcgttattctaataataacttctgccatgtgatttggattaccatcatcatggacttcaatatcttctaagttaacaattgatagttggcctaaacttaacggatgttcaggatctgaaatatgtgctgttaaatcgtaaatttcttgaggatctactgggtcaggtatttccacatcttctattatggaatccttagacttagtactgtccaaccccactatttcctcttgttcttcttcgaatgatccctcatcacttgttaaatcaggggctgaatctaatagtaataatttatccaaaagttcaatattttgtaatgctggagaatttgtagaatggtctatttttaatattatccttttcctttttaatgcttcaatgcttcccaaactaccaagtaattgctcatttgcatcttcttttctctttggtaattgattttcatccaaggcatctgggttttcatttatgaaatcggacatctcttctgctatattattcgatttatataagcttgacgtaaaataaaaacgctaatctgctactttttcaattctataccatatattttcaatggaagtaaaacaaagcagccgtataaatatcgaacagattacgtcgcaactatgtagagccacttaccattctcttttcatctaatttatttcatatgtaaatttgcttttctgaacgtccctatatactttaattttttcattttgtaatacaaaaaattcctccaaaaagtgtggatgtatgggtgtgactccaattagtcagcaaacgtgtatctatcatctatcattgtcgaaacgaaagactcttccctgagtcagttgtcatgacaaaatcatatctatttacgatactcttaaatggatatatccattgaacaagtagtagaatatttttgcaaagaaaacgtttatccttcaatttccaaattttgtaccacttgcaaaacttcataaggaaatccagccattttcgctacgttgaatgcatctgatttctcacatatacctggtttcaacttataatcgtacataaacctgttattttctagttttaaaacactggtttggtaatactttatttgtaatgctagcaacttgtatgattcatcctttgaattttctagtatcgtttttatttctttaccaaaatgtgtggcaaagagagttctacatttgttgtgttccatcatatatttaatggtagcaaatgcaatcctaaccccttctttgccgctagtccctcgaccaatctcatctaatatggctaatgatctcttggtagctccacgcaatataaaagaagtttcaatcatttctaccataaatgtactcatgtcgttgtacaaatcatcagcggaccctacacggctaaaaatcttatctactataccaatttctgctctatcacaaggaacgaaacatccaatttgtgctaatatgacaataatcgcattttgtcttaaaaaggttgatttacctcccatattaggacctgtgataatccatacttcactcgaattaatttcacaatcattactaacaaagttagataacgatttcgaggctaaaccatcctccaccattatatgtcgaccattaacaatattaagagttacttcgttggttactttaggacataccaaatttttctctctagctaaccttgcaaaggatataagtatgtcaagataccctatggtgttattgatgtttctgatttcgttactccttgacactaatttatttttaaaagttaaaagaatagcattttcctccgtcttgatattaataatagcattttcgatggcatacgccaattctgtccatcttttatttgcaagccataatgtctgacttgacttttgtaatacagaaaatgtagagtcattaaatctgaaatcctgatttttcgatattttttcttgtagtttctgaatttgttcactatttgcaacaatctggacaacataatccttgctttgcctttgttttaaagatattctttttatttcaaatgaagaaccaaaaaaattcttcatcttcctttctaactctaactttttttgttctaaattccaataattgttaaataacaatctcaatttaggatgaaaggcaggatttataatactcatctcgtacttatatctatttccatcatttgattggtcatttatatcaactatagaccctttatagcattcatcatccgcttgcctcttttcagatttaagtatttcttcttcgctgagtgaattataaatatcatcaacaacagtattatcaaaacgtaaatttttaactaattcctctagaattgccttatttctttttgtagtaacacaatttttatattggtctaacttttccaaaataattgacaaagtttttaaagatttcacaattcgtaaaagatcaataccgttgcctttaccaaaactgaatttttgtaaaatcctcgatatatcagaaatatctttaaaacattggacaatagaatcacataatgcttcattggaagaaaataaatcaacaatattttgccttttctttatttctttaatgtctgtggatggacctgataaccactgttttagtagtcttgatccaactggtgttattgttctattaatggtagataataatgatccctttctattgttatttaatactgttgaatgtagttcaagagctctacttgttctagaatcaatttgcataatagaagacacagcctgtctattaggtaattgaaaatttatagaatagtttgggaagtgatcactcacatagactagtaaatttcttaatgctgccaattccttctgttcaaaattttcaaaaatatatctcaattgggaccttgtattatcagacaactttttattttgagaagcaaacaaggatataaatgaagacacaggcctataatgtgatgaagggttttgatacttaatgaaatatttcttcaattctactaattcaggataccaattaccactttcaatcttgtatggaataagttcatccttcagaacaatctccttcggttgaattctggttatggtagaaacaagttcacataaatgcagttgttgaacatataattcaccagtagaaatgtcacaccatgaaattccaatttttatatcactgtctactactctttccatacatttatcaggaaactctattgtcaacaaatatgaattttctttaaagttctcaaatgcttcatcaacaaaggttccaggtgtaacaattctagttacacgtcttgtaaacttagttggattgctattaacatcaagatcttttttgaattgatccacaatagtaacactatagccgtattgatttacaagtacttttaggtgtctattcaactgatgtacaggaaatccagcaaatggaacttttcctgacgcaaatgacttactggtcaatgttatattcaacttaggggcatattgagttgcatgctcgaaatataactcatagaaggaacccatttgggtcaatacaacattatctttatatttatccatcaattgtctcacttgtcttatggacggaggtaaatggttagttgaatttaatttttcattgtttgtatttttcttcttaatagaaatatccatgtcattattaagtaaaagcacttccctttgatctttttcctccttgtataaatcattaaaatctactgtaaaatttgtaactacaggtttctttgttgtgaatttttttgaagtagctgacaaccactgtcgtctatttaaacgtaacacattaaaaaattgcgatgttctcattattctatattctatgataaaatcaaccttgtttggtcaaaaagtaaagaaaaaaagatacatttcgtgagtactttatttacctaattcacagaaaatttccatatatacgtatatacaatccaatctgtatatacacttcgttacaacttgtttatagaataacaaaaaacatgaaacaaattaaccgctaacaaccaaatctcgtttttaatggaagtatgttttttttattatttccacaatacacattgcatctcgaagggatttgaaaatttcaagtttcattttttttatcaactattttttatgatataataaattaatttgatgaaactgaagcttggagaaataaaaaataataagacagaataataaatcttattactctggttgtaattgtgtttttgataaaactagctaaacctacaatgaatgctttttacaaactccatcatacaactgttctttgtttaatgattatataatagcaaagattatcacaattcctttctattagttcttatactaatctataatatttaattcgttaaatgtgtgattattataaaatttcagttaatcctgtaaaatacaatgcaatagttgacaatataaaaataaagtaatatatacatatatttcaattcaaaattcaaaagaatgtattaatttaaaaatcctttacagctaggtgcgccacaataacatggcagtctttcctcatcatccttttctctttcaaatttataatcatatgtcaactcttcatttttagcaatatctcttaatgcataaatgacaatacgtttcttaccacccactttaataatcttcgcagtacagctgggttcacaacaatgatttataaatctagcaatgccacccttctttgtcgcatcaataacattattctcatctactctgaacaggtaacttgagcctataccgcttttcaaatatcttttttcacgcatctctgatactggttgtcttattctttctccaacatactcaatgatcatttcatttgctgcaataggctctaacacatataaaccccaattatgaatagcagatcttgcaaaagtaacaggttttctacgcttatttaattgatttaatgacaacaattcagattcagtaccaattgcagccttctgtgcttcaatatcctgttgaaaccttctattagatgctctattttctcttgaagaaataatttcctgacctgtgatagcattttctgtagaatcaggtttcaaagattcctctctttgcactggtgtatttgaaccgtcctctaaagattcataccctatatttgcgctatgactaacagtattaagtggttgatgtattctacgacgatgcggcaaataacatgatttgagtctatctggaaccttaaagaatccatgggtcttaaaagaatccccttcccatagtaacgattggtcaaaaggaataccttcatttaatttaaagtgtgtttcctctataaattcctctatgttaatagaattcttaattttccataactcatattcaattaatttgtttttagtatcatttgcagcttgataaacaccaaattcttccaatacctcctttagtaacctcagatcttcttcatcctttatggtttcttgaagagtttctaccgttatttgacttttatcaaatacattatcttcataaacaggtactggcttatcagtttctgtaggattgtatatatctaaatcttgtttttctctttctaatttgccatctaattgtacttcatcctccggcgttgtaggcattgtttccagcgtttctatttcatcaataccctcttttttatcaccaataaattcattatggagtaacttaaagtcttcatcttcatcttcatcttctgcattctccataacttcatcgtcttcctgagaagaagaagtatcttcttcctcttctacttcctctacctcttcttcttcttcagagtcatgtattgatgattctgttgcatatgtagtaggtgttggctctctggaattaaattcgtcgtttaagaaatgttccataggttctaactgcaatctagctcttttagaatgactgtgcaaatgatgagaaagacgtcttttatggacatcttttggttttaagtatccaccataaagcttgaaaatatccatatcctgtcctggagtactaacatttatattatcttgtagagaagtactcaacatatttgcatttgtacttgcaatattactttgtttttgggcttcattttttgactcttcaagtttccgcttggctactaagtctggaaaattgataggattcaaagtgtcaaagacactcggaccaataattctctttcttatatcaatagtcaatgcatcttttaaatcttctaatatatatttagtagcagctcttaaaagatcttgttgatttttatataatgtttctttttcttctgacttttccttttcattgtttgatagatctatgctataacctgaaaatcttgaacgaattaaaactggcagaatcaaagtaaatctaacaataattgaaattcttctatacccacgagaagtaattgtcatttttccagactccctgttaatgcatctaatcgcttctccaatatcattaaaaataatgtaaagtcctgtactatgcctaataaaacgagcaactttatattgccttaatttgtaagctaaatcctccttagtaataccatgatatccaagaaaatttattgaaataaataaacatgctttattgcccacaatcctttctatatcaaaaggcattctcttattgcttctgttatgctcctttgacaaatctctaaacaacttatgtttttcatcgaacgacaacttagatagatccaagtccactgattttccatttaggatcaatgaacgagaatctgtcggcaaattcacttttttttcacttgaattaaccttcacaattgtttgattagtttttaattttaatgcgctcaatttggatttccttgtattttcttcaataaatttttctttaataaattccaattgttcttgatttttctttatcacaactttaaaatgacaattcatgatattacaacctttattttcatgcctctttacagccatatatgctgccttagcagagtcgtttatcttttcatgaaggcttgtaaatttaattaaatatatatgtaatggtaatgcattattcggatcattatatgattcaaagtgtgatataggtccaaatttcttaaaataattttttattgaaatgtccagtatattaattaaattagaattatcgctctgattgcatggatacactagtatttcagatgaaggtggtggtccaattgaatatttatcatatgacacacgtccaataatagccaaagcgggttggtattttcttttcgtcctattaactttattcaagtaaaggttaacatctttttcacgaggatctacgctaggttgtttaggatttatcatatatgatttacaactattagaatcatgagccaatttcccatccggtgttaagttaacaaatccatttatagggaattgttttgacttattccaattatgaaaatcattagtatttacaagtttattggtttttggatccatataatgatatttagtgttgaaatattctttatcatattttaatacaatatttattttatcctctgctaaagtatctgcgtgatgatttgtaggtaatgattgtgatttggcagatttactagaactaattccattaacaagatcagcagaagtatctacatgataccttgaagattgttgatatctggaaggttcagaatcttgaaaacttcccatattttgagatcttgtttcataatatgaatatctagttccttttggatgacgtgggaatgagttgttattataactgttgaaactatgatcgtatgtagaagaatgtgaatgatataaaacatgagagctatcactaggattatctgatacagtggggtaatttttattaaatcctgatgatcttgaagagggatgaacataatttctgctatatgattgtgtgggagatacatgataattcctgtagccactactattatggtaattggatcttgaacttttatgattacaatttaaattatcaccactaccactgttattagaattattactactatagctatagcctgaatatttcgtggaatgataggggcctgctctaggatgttgtggtaatcttctgttatatccagacatagtgatatttataaagagttgataaagtagaaaaaatttatagcaaaaatgaaaatagtccacaaaaaataattctttcaatttcctctttcaaacttatatgtatataaattatataaattaactcaccacacttacacacccccaaataattatcttatagttatctctttgcttaagtctaatatttcttagattcgcctattctagcttgtttcaaccttaaatataattattcttttggtgctcctttaacgacagttgcagttatagtaatcttatcttttatttcactgttgtttatcaattaatttcactatccttatgactgggctctgtaacatctgtaacttattgttacatagtttggttgttttactctcttaaaaccttcataatatcattaattttttttatgtaagtgcagaaagaaaaaaaaaatatcaaaaaaaaaaaaacattaataaacaaaaaccatagcgaaaatattgctgagaacattttagaaacacattattcaaataaactaatgaggtcaaatctgcacaccatttattataaccactctcaatatagtacttcacttttattctcaaccgagtatagtgttgcaatacaaaaaacggagtagaaagatagtaaaccaagaaaacaatatgtctacccttcaaattcaaaagtgccttaaggatgttctagcactagatcaagaaaacaattcatacttggattggaatcaaggcaatcttaaaagactatttcatgccacttctgtattgtatcagacctcgattaataaggtccctttaagaaatgatgaggagacagttagaggccacatttgtgcattattagcttgtgaaaagctacgtgaaaaacaacaatcaatcaggtacaacctatcaaaagaaaatgagaataataatgttgaagtcattcaatattatttagatagaataccgttagagcctaaaaagattaaccgcctcattagtgtctttaaacaaaatatatcccaatgttcgccagtgaaacaaattcagtggtctccaagtcccaagaagtcagcatcaagaagtcagctaaatagtccattaaattctcccataaaagccagttccatagataaaggcaataatggatttacaacacatgatccaaaatcacttcgaaaaatgctatttgaagatacacctaaaaacttacaatgtgatcaagtatcttctgtaaatataactgtaataacacctaataaaaatatatccccattatcgagtccaagaagaagattaaagttcgaaatggtggatgaagaagatgctgaaaatgataatagcaatgacaagaatgaaactacaagtgacagtaatgaacatacgataggaaataatgaagatgagatacaacaagatgtaaatattttagatacaaagacaaacgatcaagatgcacaaacggacgatcctttatttatagataaaacgtttgaagctaatagtgataaagataataaactttcaaagaataaagttacaaaaaagccagttataaaaaaaaatccagaaagaaccataacacaaaatcttttatttaagagatatgtgaaagttgttccatcagatgtaattagtctatgcaaccattttgaattaccgcagtctgtttcgtttacaattctggatttttacatgattaaccaatcatatttaatctatcagtggcaattggtctgtggtttagtattacattgcacatttattgtatttaatgaaaagagacgtaaagatcctcgtattaaccatatattactggaaaagatgatggattatatgcgttgtgattcagtcaatgatatccgtgaatgttttaacatagtttatgaacttattgttggtgaacaatggtatagagatttggagataaaatataattattttgaaggcttaaagtatgaagaatcgattaaaatcaaattgggttcgatgttacaggataataagactttgtttaatgatgatcaatatgaaaactggaaacagaatatcttatttgatttatccttaaaggagcgttaagtttaccgtatacacaatcaaggatcataaaagattgaaacaacattgaaccaataatatgactgtataggtcatgattctatattcacaacaaaatatacatagctaaaaagtatagaatgataagataaactgtaaagttaattcaattgatcattttttaattatatgtttatatacacaggttataacattaaataattcagcatcaagtgctttgaatacagaaaaagaagtaaatacatgtaaatccgaaataaaagaggaaaaaaaaaaaagagagagaatagggtaggtagaaaaaataataacattggtttatttcatgtacttagatcattttgtattgtactatataatatcacatcacataattagatcaatccttgtgcacgatattgagccaaagcttcttcaactctcttgctaatgatgggatcagctctaattctcttttgaatcttagcggcttcagcaaacgtgatggcttgtaatttttcttcatgggttcttgttaagtgtgcagccttttcaaacaattcaatagaagtatctacctcctcttgttgcagtttcaattgtgccaaaccaaccatggcttggtcatttcttgggtctttatcaacagcactttggaacaaatcgacagctagttggaagttttccggtgtaacaggctgttgcctagctaagatagtagctttaccgattaagggagctacaccaacatgaattttcccaccttccttttcagcaatggcttcttctaatttaatagcaatatcatattgtttcaaagcatgttctaagtcatttttgtcagttaataattcagcaaagaaagtagggatctctggtgccaatgggaatttctgtcttgcctcgctgaattgtttttcacactcaggataattatcttcacgatacgaaagacatgctaattgaatataagggaagacattatttggattcaattctatagccttagtgaaatcttttctagcagaatcataatcttgggcaataaaactgatttgaccacgatggtaatatgcgatagaattgtttggatctaaggctaaagcatcatcaaatttagccaaatattgctgtttcaaggactcattatcaatttgttcattagattcgccaccagagacaacggcagaggcagcgccacgcatgacggaggtggcccatttgtctgccaagatcatagccatgaagatattagcattaactcttggatacaattcgatagattctttcaagttatcttgagcagtgacaatatcatttttcatgaaatttaggataccattatattctaaagcaatagccaatttttgttgaagaatcttcttttgatcgcctctattttcatttccagttccgttttgatttttatcaagatcccttaaaaggtctttaaaagcaacgacactctttgggaattcattagaagccacttcaaaaccggaatgtgtgaatttgtacaaggtatttaaagcagtctttaaagagacatcagcgtctgaagattcgtcataatgttcgaattctaattcaggtgggatcaacatattaaagaaagaagccaaagaggtatcagaaggcaaagtcttttcagcattgctattattgtcggattgttcagtgatcatttcagttaatttttttaaagcttgtttgttcaagtttctttctaagataggttcaatggatgcgccactgaaatcgttatttagtgacaaaacagataaatcgaacatggcatcttcgaagttacccttttgttcgtatgcggaggctcttctcaataggactttcgagtaatctggtttcaactgtaaagctttattacaatattccactactttatccaaatcatttaaggagacgtagcaagcagaaatgttggagtaaaacacagggtcttctttgatacttaatgcgtattgatagaatttcaaggcttcatcgaagttttttgatttgaattgttcgttaccgatttcctttagagtcaaagtgatagtatcttgttcctttggattgagagttttaatctttttgatatcaggttctccgttgtctaagacaggatattttttcttaagatccgagatattatctttttgctgtttttcatcttccaatttcttcttctttttcttatctcttttttttttactttttgaaatggaagaagcagtagtggcggtagttgaggatgctaaggaaccgtcttcgtcataaccatcattattatcattatcatcgtctttatgatttctagacttttcaacagattgtagattcttataaatatagtaggccgaagctgcagtagaaaccgttactacagtcgtgatgattgcttttctgtgcctatagaagaatccaacagtggatgattgatttgtagagttatttccaggcattgttattattactgttaaaaaggaagaggaaggagtattagatattcaaaggataaaacaaaacaaaacaaaacaaaacaagaaatgacgagaaaaaatctgaatatggtctttatacttatttctattttattttaagatttcttcctttttgtttcaacaatatcttattaggaaataatgtagatatcctgggttaaaagtagaatagatatcttatatcttatatctgatatcttttttttgttttattttttttttttttaaattttgtaagaacttatgttgtatattagactgtaagtgtgttaaagtttcctattgaaccgatttacaatatttcaatagtttaataattaaataataatattattatttttatttttacttttatttttattttttttcccacccaaccgagcactaaaataaaaaaaaaaaaacaacaacgacgttgagatgtactgatgttactattttgtcgttgtatacggtatactgtgggtgtgtggatgttcgacaacaattatttatttatttatttatttatttatttatttatttacaatatgtacatgtattttacaatatatatccatataaatataaaactatgcatccatatctatatatatgtatggttatcttctctgtgacatccacattgctttacagtccttgtaagttttaaaaaattctttacaaactgtttttttatctggattatcccagttatcttccaaacactgtctactcatgcgtgcagattcttcacatggatcaaaatatcgtgacggttccttaattttgaattgcatctgtgattcaaaacttgttggattatctgggaagtatttataactggatggatcgttttcatctggtataaagtcgatattagcctgtttgctagtattactactagaactactattatgattatttgataacataattatataaaatctttaggaatgattatatatatatatatatagtctcttgtatttcttctccttttccctctttttttctctccagtcagaattttctgctttctggtgttctcaagagattacagtataaaacagtgcacaaagttattaaagacagaaataagataactcataacaaatcaaaacagatgatattattataatgttttgcacatgttgatgggtggtgctagtagttgtacaatgtgtctaacgatgtgtttgtcttagtataagcacttggttattccttcgtgatttctacggacttccctttccgattgctctttaatggaaaactctggtgggcggctccagtgaagagagaagaaaagaagggaggaaaagaggagcaaaaaacaaacaaaaaaaaaaggacaaaacaaaaacagaataaaacaaaccctaaatgaacctaagtaaccctaacaaatcttaaataaccctagggttgctgcaacattttttttttttattttatagtctggatgcatgggtggatatcatgaaagtttcttttcttttctttgttttttttactcattttactttcaaatttttgcaaaacaaaaaaaagaagaaaaatacacacaaagaacgaaacaaaagtggcagagaacaggaacaacagagagaaagaagaagatagaaatataatttcttagtgtttctatgtgtactctacaaagagtaactaactttttatatacaggaaacatatagccagattaatcagtctgaactaacccaaggtattctctctatatttaccataatatatatatcagtctgtgttttgctaagaaactgaaagattgtgtgactatcatatcatatcatatcatatcatatcaaatcgtatcatatcataccacattatattatattatattatattatatcattagcattccataaattaatatctgtatttaattacaaatagtccacatctttttcctttttacttctctcttttcatttgtttttgtttcttttttttttttaatcttctgttttttttttttttttttttttttattttgtttattaaatcattttatacacacggctacacaaaagaattctgtggtagacattaaaagataacataacatagcataacataacataagatatatatatacatacacacacaaacacatacatatatatatatattagttctctcccaacctcccttcccaattatatatcaaccacatgagttctcagttctccgcctttggtataactactcgtacacccaattctaatacttctggtcagaacacagaaaataataatcatcacaataatataggtttacataatcatataatgaatccatttagatcaaacaattctactactactcctactactactaccactaccaccaccaccactactactatgaataataataatagtaacaacaacaacaatagcaatagtaatagcaacagcaacagcaataattttaatattaataataatgttcgattacctatttctttatctttaaataataataataataataataataacatgcatcaatcttcacaaaataatttgatagaatcattgggtcccttttatcatagtaataataacagtaacagtaacagtaacaatctaaataataataatttatccactgctaataatactatattgaaaaatctacgtcactacatttatggtgcagataacaacaacaattctttatcctcatcaacaacgtcttcaacttcttctccctctaataataataacaatactttaaacctagacaataacctatcgttggatttacctgatagtgtacatttaccatctcctttacctcgggaagaattgaataaaagaaaaaacaaatatggtcttttcagcatcagattgactccatacatagataatacccataatcataacaacagcaacaacaaccttaatgataacaacccatccatgaatagcggcaacggcctgttctttgaaccaatcattagaaccgccgggccgggttcacaattagttattggccgctacacagaaagagtgcggaaggccatctctaaattaccagagcaataccaccccgtcgttttcaaatctaaagtcatctctcgcgcgcatgggtgttttaaagtagattcacagggtaactggtttataaaagatgtcaaatcctccagtggaaccttcttgaaccatcaaagattatcccctgcatcaactttatcaaaggactatcttttacatgatggtgatatcttgcaactaggtatggatttccgtggtgggatagaggagatttataagtgtgtcaaaatgaaagtggaactaaacagatcttggaaacgtaaagccaataaattcgataaagaggctttgcaacgaataagaaatttacaaaagttgattaacgatggtgtggaagaggaagactgctctatttgcctttccaagattaaaccttgccaggccatctttatctctccatgttcacacagttggcacttccattgtattaggagattgattatgatctcttatccgcaattcgtttgtcctaattgcagatccacatgtgatctagaagctaatttaagtgaaagcgaagatgatatggatgattacgtagaaggggaagaagcaaatgaatcacaacagcaagaacaaaatgaaaatggaaataatcccatcacaccaaacaatcccataactaataacaccgccctcaccaccactagcaataccactactaccaccactaataacaataacaataacaataataaatcaaatactgttgtagcacaaccattctccaacaatgaagaaatctcaagtatgtatgatattaacatgtcataatttgtttaactatcttagtctatctgatttttttaatcatatactgcatttatctacataacataaatataaatatatagttataatcttgccttccttctaatctacttttatatatatacatatataacactaatacttcttgcaaaatgtattttattcataccgatataaaatatgcaaatatatagattaataaacgtatgaatagtataaaatactttttttttagttttatttatctttaaaaagtagtctattttatttacaataacttgttggaacaagtcccttaacgccattcaattcaccatatgtccaaccactaccatcatctccccgtatcacagtaatcacatcaccaggggatatacttaattcgtcattaccttgtgattggtatggatattgagcagttatagtcctcattaatggattgttgccacgcctaggtggtggtacagttggtgggctagaagatgtgttgctctcatgaatttcaatgtaagttgttggaactaaacctatgataccattcttggacatatttctcactaaagtccatccagaaccagtatctttttccactaattcaatactatcaccagggtgaatagtgatttcatcatcttcttgctttttgtatggatacaaaactttatttttattaactgtgtatgaggatgttcctattgatgaacttgttgtattcgaccgatttcttcttgtatttgaaccattagaaatattcaaattttgtgttcctgtatcaatatcttcaattgttgattgacgattaccactattatcagtattcatgaaaccaccgtctgtatgtaaaatgtttttcacttttagtttagagaataaaccgcttccgccgttgctattgtcactactaacattgctgctaccacctcctaaaagagacagacgagttttaccttttttggatgctttatttttatcttcctcataattttgaacatttaaatcaatatcttgtggaacattattttgaatgctctcaatttctacctgagacaataattttatactttcgtgagaagtaaagcctgatataacagctaagtaatttttcaagttatcataaaattgtacgctatcgaatgactcttcgttattcttcaaattttgttttatcttattatatttggccagtttttctaattccatagttgtcatatcctgcatttgattgtaaactttttgtgaattccttaatttcaatttaagatcttctaattcattagatcctgagataataaattgttcatcatcatgccatataggagagggtttaaattgaaaatctaaaggttctttccaattcttaacattatgtttaataaacatagcagtacttaaagaaggtctattctgtttaacaacatcacctgaggccttcatcctcttttgtaaagagccacccaaatcaatctctatttgactagcttgactccaaatattgtttaagaaagaaacacgagcctcattaagatcttgtaaaagatctactacctctgggatatcttgaaaataatatttatccttgactctattagcttgagagattttaattagatatgaatttttagcaatattcattaaagtctccttttcacttagttttcgtttatttctatcattgggactcttagtgtatttactgcgtgctaactccatattttgacatgaatcatcataatttctttttgatttctctaaatctgagtacacactatttttcctcttttccatctcattaaaaaacccaacaattttagtatatgtgatgtctaactttgtataaagaccattaatttgcccactgatagtgttaacaaaatcctgtgacagtttttcgtgatccttagcaattaattcagtttgagtcaatatttcattccatgctactacagaagcagcctcaatagaaccaggagtaacggtaggtgtctgtccaactcctaaggtgacactagccacacttttcttattgaaataatctgctgttaaagcctttaatttatcactatattccttctctaatttggacctttctctgtaaaaactttcaacttctgataaccattttaaattatattggacccatttggatgtcacttcaaatgaatcctttaattcattcccaatggataaatgactcattcctttagtttcttagtatatatgttaacaatgtattatatttttggtttttggatcaaacagggtcttatattaaaaaaaaacggtgagtgtaatcctacaaactattagttgattatcacagcaacagtctagtttcgtttttcttaggattcactagaagattaaaattatctcgatgggtgatcctttttttatggaactgaatcttagcgatttttaattgcaaatatgtatatatttatattttcacaattcttaaagcaaaaaaaaaatacaatattgattataaaaaaaaagacaccactgcacatataactgtttttgatagtgaatcggttaataaacactaatgtgttattgatataacattacattaaaaaattacaaaaaagttatttttgcaattgttgaagaataatattgctagtggaaaagattaataaacgctttctcctgaggtctctaatcataatttatttctgctaaatacacaccgtacactcttgttatttattataatgccacatcaacaacgttacaataatggttctatgacaaataacgaggcaatagagagacaacgacaatatgaaatgtttcaagagtctttacctaaggtgaataaaatattgttccaaatgattctaaatgaaattattccgctctctgttcgtattgaaaatcagttgacacaaggtaatgaattccaaaatgatacaaaacttgatactctgggtgattcttcctttgataaagcttctgatttggataatattactaaattgaaagatttatccattaatgcaaaagcgaattcagagactcatttaggaaatatatcatcacctgatgatgttttaatttataaattatcacagtcagtagacgagaatgaaaacaaatataataatatattaaaaaggattagagatataggtatcaaaattggtactaaattagtcaatctactaatattcactaataacatcaatttaaattttaaagagatggacttgttattgataatgaagttcatttgtcgtgatgtttggaaacacgtttttggcaaacaaattgacaatttaaagactaatcatcgtggaacattttatttaactgatttagaatatcctcttttacaatctttttgtattgaaactaatactattccatctcaattaaacgaaaaatttattttaaataaagaatcaaaacttgttgaaccatttttagagttaccagtaggcatcattaaaggcgtattattgtcattaggataccctcttgatgaggttatatgcttagctacatttattgataaaccaaaagaaagaataaaaaacagtttccctaaaggtataagctttcatgtacaaatcactaaatcattcttgccacaacaacagaaacaataaagtattaaattcatgttatatatgtatttatatatcatttataatttaatatatgcaattaccaatgtttgataataacaagaagtttagtggatttatttccttttccaccttacgttttataatttaattttttgaaatcgattgactgtgagttaatattcatattaggattataatttgaaattatattatttgtttcatttctctgtaaactcttctttttttgtcttttattcgcatttcttctactacttagattatttttcctcttttgactagtcataacttcagtagtactaggaactactgaagcactatcttttcccaccataaacatatttttattattttcattttttgaataagctgtattattgttagaatttgtatcatctagtaggaaataatctgggaatgtgtttgatggtttaaccatattgatatttatattatttttatcaaatgcttcttgatagataccaataatgtcaatatcattatttttattcatcttattatcagcctttatactattattgggatctttaaatttagaaaccatcattggtaagaaagtggaagttgagtcagacttaggatttgtgtcaacaggaatccctttgttagtattagataaattgttattctttggtgttgtagtataattagaggtatcatttttatatgaaattggcatatgactaccttcaaaattattgaagttaagatttgtagtcattgactgtaaggggcttacgtggttattaacattaaaatttgtagaatctgctgtaatactagaatttgaaccgttattattattattattattattattattattattattattattattattattattattattattattattattattattattattattattattattattattattattattattattattattattattattattattattattattattattattattattattattattattattattattattattattattattattattattattattattgaattcgaggtcattttccacttcactgtttgtagaaagcaaactatgatcttggtctaaaccgggaattaatttaatgtttgcattacctttaccacgtcctttaatacctttatttgaatttttatataatgatgcaaagtattctagtaattgcctatcatgctcgggcatatcatcagtctgtggattccatttagccaaaatatttgtcaggtgtagtactgtatctttatggaacctattttggtgtgccttcatgttccctaattgtgtaaaagttttgttacagttctctaacttacaaataaagggttttgtatcattatgtgtaaacatatgcgctttaagattccctttcctagaaaattttctcttacatatatgacattcatatggtcgtaacccagtatgtaatttttcatgcgttctcaaatttccaccttgagtaaatcgtttctcacagaatctacatttaaacggtttataacctaaatgagatcttaaatggacttgaagatgtgtcgactgtttaaaaacatgttgacaatacggacatacatttctattaatcagctgtttctcttctgaagataactcttcaatattaaagaaattattcaatccagtaatattcaagttgttttcattacttgtgtttggtgataaaggagtatttggattaagcttatcttgatcaatactttctgcaagattaattttggcactatctaattcagaatcagattttaataatccttttaatatcgattcagaatcgctttggtttcctgatattggtcttgaaagaattatgtccttctgaataggtgagagagtcgaaatatctctatctttacgtttggtgatacctccagctaagatttttttatctggaacaatatttggattttcatctaataataattcaccttccttgtcggttttaatttcatctgtgatacctttttgtctggcttgaagcattaacattaattgatcaattcttgtttcacccagcggtgtctcagatttatcatagaatgatgtgtttgcattggattgttcctcttttattaatgtggatttctcaatgcttgcaggcttgtttttcttaatagccctttttttcttactattcgtttgctccaatgtattttgttcatttaataagggagaaatactggcaggtgatagaatatttagattatcagtagtgatattagtagtaggagatgtagttttgtcactattatttccttctaaataattatctattgattctgtattaataactggaatagtcattttatcaccaaacaataaattatttaaagaagaatttcttttactatatgaatttgatcttgatttttctataattatgttattattgttagtgatattattgttgtaattggaaaatgatccatatggattcaatttaataaaatctttaggttgagtggataaaggaccaatatcatctgtatttgcagttatattagtggatgtactggtgattgtatttgaactagagttagaatcagcaaacaatttattggaatccaaatcttttagtatcatagaagatgttttctcattattgagaaaatcataattattaaatgataacggattaaagttattattaccattagtattgtttgttgttggataggtccaatcaaaggattttaaatcatttggatccataaaaagtatagaagattttcttttgggtttaatgaaatttagatttgaactagcatttaaagaagtgtctaaaatagtatttaaattcgcattaaataattctccaccattacttatatttatagtattatcagtattatttccagtgttggtgttattattattattagtgtctgccgattgatttgaattgaaaatgctagaattaaaaacaatgttattttgattgatagtattattatttaaatatacatcatttaaattaatattatcgtttttattattattgttatttatggtggctatgctggatggaatagaagataatctatattttgtattgaatactgggatatcttggttgagagcaggtaaaatctgttgattttgatacgattgtatgttattataattagaggtagaattattatatgcgtttttaacattaccagcaccattcttattattattagtactaaagatcatattattgttaaatatcgaaaagcctcttataaattgattcagttgaggatccgggggaagtatatctgtgtgagacacactatagcgtgcatactgtggttcattctgtgctggcacagtattatcaatattataggacaaaatagtgggagcagtagtgggcgtaatattattattgttggtactgaacatagctagttataacaggggaaaaacttatagctactatcaatataaatttataaacagttttattagaaaaaagataacaataaagtattagataaaataaacggttaattgaatatggaatatatgaatatgaatataataaatgtaaatcgaaatggataagcaaaaaaggggaaaaaaaggacaaataaacaaaagaaaaatcagtggatatttgaaataccagatggaatatcttataatatttatatttatatatctctatattggttaaataattagatccaggatgtggagaaagatgaaatattcttttattcaaagcgatttctaccgaaatctatttgtatagctgatgttatttggtgtattctctgttaatctgttaatctattaataaagagggaaatatataccttctaaaagttttatagaagaaaatataacagggtataaggatgttagtgctacagactctagtgttccctcagtgcaccaataataaattaaagtagcatacactcacacactttctctctctatttccctattccttctttaacccttctctgtagagtcattaggaaatccgcagttgatttcccacaaaaaaaaaaacaaaaaaattataaattaaaaaaaaaaaaaaaaagattactaaaataaatgggagtttggggacagatcaaaatatcggagttcaagaagaatggggaagtaaatccaatatcgaacaataagcaatacgtattgagtatatatgtacaaagagtcataatatgtgtagaggatggaatagattgtttgataaaattctgagaataacattacaaaaccaatgtacgtatatattttatacagtcatatatattcaaaatggattgaagacggaatgggattaccaatcatcatcccatgcatcgtcaaattgctgttcttgttgttctgtaaactcttcctcattggatacctttcttgttatagatgacttagttgctattaaagtcttctttgattttatgctgttattgcctaaaattgatttagctttgttagcattgctttgatttaatatagaccttttttttgctgccttactattcttcaattgaatgtttcctaaaattccggtatttttttttgatgtagtaccatcatttgttatcgttagtttctgcattgaattgttaatatttgaattgtttaaaatggatggttttttattaattgaatgagagggtctggtaggttcattccaatcatcaaaatcatctatccaactgttgtcatgattattatttgtaacagtagtagatatattattgaatgttttttcattggaaaaaaacccctttgcatatgaattatcttcttgatagtcataaaatccattttcatctttatttgattttaagccattcatgaattcttcaataatactatccacagctttatttctatctgtgtctgcatttgtcgattcaaattctcttatataattatcaataacactagtatcattaccgatatctttctcttcgctctctgcattttccccactactgcttgcaaactttaaatctgcctcagtttccaatttttttaaatatatactgaacaattccttggccttcattcttataattttatctttatccagtaaaccaggcgcaataacactaaggatcttattagctatcacttccacgttaaacaaatcaacactaacttctaaaccatacaatgcagccattttggtagtaacacatggatcttttaacgatttagtgtaaattgtggctaaaacactgtctctattatttatacctgtcaatctatgtgatattttaattaaaacaaatactgtccatgttcttatatcttcttcttgatccacctgggtttttgcaatagaccttaatatctcattgtttaattgcctctctgtgatctcttctaagatatatgggatggtcttcaatgtctgtaaccttaatactttatcggtatctagcataccttgtaagaaaaatgtgaaacatctattactgaaatccaaagtcttggtcggcaagcaatcaagtagcttaggcaaaaagatcaataaaataaatctaatttgtctgtcattagctttaaagaacagatatatcaactctttaatatcattgttaatgatgaccgtatccgaattcgatgagacaggatgatattgtgcaattaaatctaataaaatcgttaacaatttaattaaatcaccattgaacatttgcaatccattatcaattgacataatccactttagagtactcacaatctcaggtataatcagattttcaatgaaaccggtggttaatccctgaaactgttttctatcatggcatccaacatagtaattttcaaatcgtttcatcaaaatcaatttatctttatctgttttaatatgcaactcttttaattcgttatatatgaataatagttcattgcgtgtccataaattagtagcttctacttgttgaataaatcttttcattgataatgtaccttgaatcattgatctgatcaaagattgcagatccttgggaacactaataccagatatcgtatatatctggttgattaaatggcccaataatatactatctattaagtggggttcggttgaattggataagtcctccaaatcgaacagagtgttttgatcattactattacaaatttgattccaaagtctaatatggtctttaaattggaaagaatcaaatttgtcatcagatttgttaaaacaacattccaaaccaaataatacccatctcccatttttgtctacgtaaatattatttattgagagattccctataatgaataagggatcaatgacaccaaacaatttgaataaatcaaaaagaccaagtaaaatcccttgagaattgactgcattagatatcaattgtggctgtaaaggctttacaacttcagtaaccacaaaaatgtcatttgaaccattcctttcgtcaaacacatccaatacagaacagataccagggactctaatgaccttactcatataagcagcatgtgaaacaagtcttttcaaatcttgctcggaagtcatagataatcttatattagcattatgggtattgttagtggaagagagtctgcctttaaagatagtcactggctctgaatcagtcttacgtttgccttcatataattcccataatggagtagtatgatatggttcagatgcaatagaatatgggaattgataattagtcagatttttaaatagtgatccaatattcatagtgttttgattggtgaaagatttttattcaattataactgcaacgggaatccatcaaataatgcagatacttgctttaactctatttgttgaactgtgctggttcctgcacctaacctattaactaatagatatgtttgtctgcttgttgatcttatcataggtattatcgagctgaaaggaacttaaatagagaaagatcaattaaacaaacaaaaatgaaaaaaaaattcttattaaggtaaaccagattacaatagaagaatactcgaaagatatttaacatattaggcacctaaaaagggctgatatagacatctgtttagataaccagtgttgtttattttcactggccttggatatgcatatatatttttacatatatgtacctactagaaaaaatgattgacttgtttgagtgaagatacgaaatgaaatagttcaattgaatatataaacatatatatatagattaaatagtatacaatgagatatctgttcaaatagatggaactacctcattagtttataagatgtaacaatgtcttgtacgttttattgacaggtaacccaacaacgttataataatcaccttctatcccctttattaaaactgcagaagatccctgtattttgaaaccacctgctacatgtaacccatctttggagtcaacatatgttttaattatatccattgggatatcaggatcaaaataaatcttagtaatctcttcaaattgatgaataaccagagtcgtcttatctcctatatctttacaatccttaatcaaagccacagatgtaataactttcacagattcatcaccaacacatttttttccatagctataacaaaacttagttaaatattctaattgtttctcctgcgtaatgggcttctcatatatctgattctctggaccaacaacaatagtatcggcacatattataattgcaccaagttccttcgtactgtaccttcctgggtagtattcctcaaggatacttttggcctttaaacggcatgtgtcatgaacatactttaatggatcatctttatacaaatttttatccaaatcttcttcaaaagaaggcttcaacacttttatgtcatgaatatttagataatcttttaaaaggtcatatcttctagaagatgaggatcctaatatgatatcatacttagctaattctctagtcatgttggtaaaattcatttttattgattcttccaggtactttttaacaaggctctatggcaaaaacgtttttttttttattattacttcttctttttgtggtcagttaatgttgaatcatgaagttgtaaccatcaggtaccattgctatgaatcgtatacctgttaataattaatgcatttagttatatttttatttttattttttgttttgttttgttttactaaaatgcttgtgctttaagaagaaagataactagagatataaagatattcaaatgttaagaataaacatacacgtacccacacagtaaaattgtttatttttttatctatacaagcaatgtataattaacttaactttgtagaatagttacatatatggatgttcatacaggatgtaatccagttagaacaattctatctttgattctatatatcatttcaccatgtttatcaggatcaatatttaagttatatccactaaattcatcactttttgtactgtagttcattgtaacatccatactttgttcttgatcctctgaagactcagttttatctttttgttctttatcactgcgatcgtaaacgctatcattcttcatagccttgtcatcatcaatattctttttgttgttctcttcatcttctagtttctcatcttcatcttcctcatcatcatcattagtatgattaccaataccatgaatgttattatttttagtcttattatttatagaatttctatttcttttatgtaatatggcctcattggggaatgctaattctgtaccaaccaattttctccagtcaccttcatataatttattacctatcctaattaacggtttatcttgattcaatccagaatattgaaaggtagcatttttttcaacggtcaatctatctttatagaatcctgaatttaaatctaaacttacatatacagtctctgtattttctttatcttcctcctgttctttgtttaggttggtcttattatcactcttttgactactatcatcgtttagactttttttaaaataccatggtttttcttcaccatttcttaaaaacacagtattaccattcatcgtaattttccatttaaagtctaaaagcgatagatcactagatgatctattatctatattcacaagatcatctaattcatatttatctaacgaacaacatccacttctaatagttacagagtcataattgtgtttacaatcaattacatccaataaatctcgataacctaacaaatttaaacctaaagatatttttattggagcatgtgtaagcagaagtatgttttctgcatcaggcatttctttttccagatgttcctccaacaattgcaaaaaggtctgtgttcttttatgtagctcctcctttgtctctccttttatcttatcatgttcctctctgttctttaaatacggatcaacacaatctttccacgtagtcttaattgaattgttaaacaatttattcaatgttgtcacgtcacttggtgggtgaataccattattcttatctatatcattgtgttgatcagttgacaaaacagaactaagaaaagtaggtctaattgagttagtaacttcatccctcgtctcaaaccattggccaatacctttgtcagtatataacggaatatctaacaatttggcaatataatgtgctgtttctacacaacgataatatggcgatgatatgattaaatcaggttgtgtgtctaatgacaataggtaatgtgccaactctttggattgtaaaacaccatgtgaagataatggtgtatctcctggtataccagttggagggatcaataaactgtcagtggtatcctcgtgtgaatcccatgctgaatcgtaaccatgtctggcaatataaattgttcttaacatcattttccaagtatctaatgacgtatatgtctattaatcagcaccaaagaattattaactagggtagagtggttttttttattactacctgatggtttccagatgtgtctgtatatttttttctaaaaccactcttcattaagatattctgtaaatctgttgatcatctgctatttcttatttagttatcttctgtatcttgaaattttcgattatcaagaaaaaaaaatccctaaatttaaagagcatgtacaatgaatgaattatgttatttgtgtagattaaattatgacggaaggtagttgaaaatcaggtaaattggtattgagcattgataccgctacattagtgttaaaaaagaataatcattatacatataatatttttaaagaggattcattgtacctctttcctgattatttttactttcttcattttccattctccccttccctttctcctttagaagaatcatggctgctcaacctagtagtaaaagaatcaagacattatctgtctgtagacctattatatatggcaatactgccaagaaattaggtttaaatagaccaaataacgcaccagcagagcatactcatctatggacaatatttgttagagatccaagaggcgaggatatctcgtattatatcaaaaaagttgtctttaaattacatgaaacatatcctaaccatacaagagttatcgaagctcctccttttgaattgacagagactggatggggtgaatttgatgtgcatattaagatccattttattgacgaagcaaatgaaaaaatgttaaatctgtatcatcgattaaggttacacccatatgataatcaaccaatatcagatagtgtggagattaatgaagctggagagactattataaaatcagttttctttgatgaaattgtgtttaatgaacctcatgaaaacttctttcaaatcttgatgtcgagacctggtaacttattaccttcaaataaaactaaagataatgtattttctaaacaactggaacaagaagaaatatatcgaatcagaaaaggcattgctgaaattgataaacaaatagttgaattacaagacaaaataaaggaaagaatgggttcaagttaattatgccaggaaaagagatatactttatagaattaaaaggaatagaattgatgggcaaaggcatgtagcggtattaaacaaatatttagattaaatttagccggagcaagataaattataattgtggaatttttttaatattataatattggttgattttcttgtgatgatattgtgaattttttatctcctgagtatgaaaaatacataaaaactagtatgaattatctaagagttcatcttagtataatttataattatatatatgtagttgtgcgatcttatacatatacctaaatatatacaattgtgcatacaatatttgtaaacactttctttttacttttttttctttgttcttttacttctcaatatgtgtctggtaactttcattatgcttccatgaaacaggttttgtaaaacatgatctcagaggttcattaaacctattttggtgttagtggttgccatgaatttaaagataatctatgtatagaatcctttgaattattattattttgtgttaaatcattgttggtgttgttatctgttataggtacttggttagattccttcactaccacgttatttatattgctattagcagcaatattttcatcattcttattactagaagatgaatttgtattagagttggtagtaactgatgtaggggtagatgatctattttttggtatcaaaataatattactatcaaatccaggtggttcatgtatcactttattagtggcaggtaaagaagttacacttttgtgcatatcatgggtaataccgtggctatcattaatagatggagtaatagttgttggtggtggtgaaggtcttgttagtctatttgttttaatattagttactccactttctaaagatctaaccgcagtaggtattttattattagaagcggattgcattggagatgatacagttttattcatagataaaattggcggtggaggaggacgtaatattggttttgtcatagatccacttggatttgttgcaatagactcgagttttgtcattttatcattactttctttctttggttgcattacagggggtgataaagatgatgctattgatgctgatgaagaagaagcagttgccgatgcaactagacttgttgttcttgatgggtctaacgtcaatcttgtcgaagaatttccattaatgtcattactgttattgtttggcatatttaaaaaacttaaatctgataatgaggtgttcatagatggaggattttcttggctatcttctaaccctaaattaagaagttgagaagttattgtactagtttcattaggatgcatttttttataattttcaaataattgctgagttaattcaatttttttcgtttcatcgacatgttttactttagctttatatgcgccaaagacaggtttgtgatcactgattaataattgtacatcagaataagctaatggctggatattttggcctttataaacgatcctgtcagtccaagatggagttcttgctttttctgaagaatcatatcttcctgttccattatcaaatttatatgtgggtctgaatttaatttctggctcaacaaaatctttgaggattctaccacctttcatctcctgaatcaattgatcataacgtaataatctagataaatagccttcagtcttattattcaattctcttcttacatcatcattgggtaaatttaatctaaaatttgtatcacccaaccaaaatatagaatcatgattattaatagtatttgatctggtgaataaaatacctctttgaatattctcataatcatttctacgatcttctatattattaatgcctgcagcgaaatgtacgtttacaaagcaaaatgatgtttgtgcaaatttgaatctaatagctaccgcacctttatttcctgccatcccgccaaatccagtttttttacttgcaccttccacctgtttaacatatttagctttatcggacttaacaaaaaatactattagcatggatgtaacttgttctactcttaaaaggatgtatttatcattatattgatttaagcattcgctaaccatattctcccaaaaggatcttttagaatagtctgcgttcaagatagaaccagcagttaattctatgacttcttgtaaacccaaaacaactatatctggcttaaatttttccccaatagggtacagccattttgataaatccagtttccgtgtattcccgttggcattaaaagttcctacaaatagattaataacagagtaggaagtgaatttttctgacattctttctaattctgatgttacatattcattaactggatcatataattgtaccggaacttgatgaggtaatctacctaataaagtatcgatattctgttgttttcccttgtccatgaaattgtttatatacattctactaacagatttcgttgcatcagataaagcaccagctaaggacattttcccttttcttgaaaaagaagattttaaagcattcgtaccagtataaatttgggagatcatatcaccatgatcagcccataatgtgttatgtatattcacgaaatcttcttcatcaatgtaggtattttctggtataagtttgtaatcttgtagaaaggatttaaatgcggctaacgagatcacctgctgaactaagtttgttctgtctaaacaatccaaacaattggttctaaatattccatgttgttcagataaaactttcttttcttgaatattgtaggcaaaataaccctgtctcaaaatagcgtccatgattttgggtatcaatctaaaaactgcagaaaaaccctcttgagatgtttcgcgatgaaaatcaaaaggtgtataataaacattttcatttaaatggatctttttggaacaagtaatgtgctctttatatctttgtgataattcaatctcagaagatttagttgaaagcaagttgacaacatgaacggaaccatatttctttatgagttttaggaaatgcttgtctaaaacgggttgtgtagcttcaatggatcttgtaatttgaactttgggatttaacaaagatgtatcttgttcccaaaaaacaggaatactacctctaatttgactaaaggaaaaacagatatttttggaatacattataaattcagtctctacaaaattagcaacattactatcatcatcaacaccacgagcattaaatctagttcccgctcttttccagctttgtttacatataactgttaatgcaactttagtgtctttaatataggttacaaatgtctcggcaaaccctctaataacagtagttaaaaatccttcatcatctaatatttgctttgcatgattatctagtctatccctataagtaataatttcttgcattaaaaaggaattccacatatattcatcttcatagttatctgagcttaaggaatgagtacccactcctctattctgtaaagtagatgttaaatcaaagtcagaactatagtaaaaggaaccatttgaaagtaatttttttaattcaaaacatggatgttttggcaatgtgagattactgctactatactgttggtcaaaactatttgagttggagtcgtatggatctgataaaattgggtagccagaagaatctaattcaaagaaatcccaggttgagtcgttcaaacagaaaaaatccacagagtgaatcttattaacattttccttcgggataggagatgccactcttgatttaccagtaatggcaccaataaatatcaagccatccacttcaataaggccaataaaaccatgtatttccttagtagatagttcgataaaatgttgagaatctataatatttttatttaccagttcaatagcacaatatggtttatcttttaatttgttggatttatggttatggactgctttaaatattaaagcatattcattcgaaagaataccaattctcctttctggattatctgataggagaagcttcattatttgtcaattggcaatatccaaatgttaagccaagaagctaaaaaggtaaataaatatgaatagccctaaacagttagacaagtgattgtggtttattactttatttgttaatactcaccaggcaatataacttattatgcattatttttgtacttaatcctttttttctatgtgttttctttatcagttttaatttttgttatatcatgaatttttctgtgcccatttcaaatgaacatagtttaatttttctgtcaataaaggaaaaaaaatatgtcaaaggggaatttgaaaaatatatatagagaaattccaattaagttatagaaattagtactataaacaattagatcataagtgatacgtagtatatatatttatgtgcaattatatataaatctatggaattaactttcttttttttttttattttgaacgatacattacattcttcctacaatatattcttatatcattttttatttcattattcaaaaaaaaattttaagtttaacttggcagtttgatatcacctttatgaataatgttattaatagtagcaaatatggcttgaacagaagaatcgctaacatcctctgatacaccaacaccccaagaaaagacgtgttcatcatcttcattacgtctgtattttagttgaatataggatgcggcttgtgtagaggaaccagaccctaaggaatgttcactgtaattctctacactcaaatgaacattaaataaattagacaaagcattgaccaaagatgaaataggaccattaccttcaccttcaatagaaattactttatcattgatttctacttgtccagtaagaattctacgttcgctgttcagttttttgacatcatagtctagtaaagaaatatatctatgagcctcattattgtaattgtatgtgtctttaaacaacttggtgatttcagtagcttgcaattcttctccagtggaatctgccttttcttgtactatagttgaaaactcaatttgcatcaatcttggtagatccaaacctaaagctcttaaaataacccatgctgctccaccttttccagattgtgagttgactctgataatagcttcataatctctacctacatcttttggatccaatggtaaataaggaattctccagtaatggtcaccatcacgccttcttttcttctgtagcgcaaaacctttcttgatcgcatcctgatgagatccagaaaatgcacagaatactaaatcaccaccatatggggctctttgtgggattggaattttattacaacgttcaaccacttctattaaggaattaatatttgaaagatctaaattgggagcaacaccttgaatatacatatttaatgctacagtcactaggtccacattcccagttctttcaccattatcaaagatacaaccttcgacacgatctgcacccgccattaaagccagttcagtggcagctacagaacaacctctatcgttatgtgtatgtgtagatatacaaactttattcctatctttgatatgggttgcgaaatattctatttggtcagcgtagacatttggagtggaaacttctactgtggcaggtagattaaaaatgattggattatcttcagttggttcccatgcatctaaaacagcattacaaattttgacagaaaaatccactggggtatcactgaaacattcaggagaaaattcatatgaccagagagtattttgttggttgggatcatctttagtcatgcttcgtactagtttagtggtttccacagctttctctatagcttgttcctgagacatttgaaatacaatatttctaaacatatcactagtagctaggtatgtgtgtactgtagcctgtttagcacctttcaaagcgtctatggttctttctattaaatgtggtcttgattgtactagagcttgaattgtgacatcgtcaggtgcattctctacagcatatttggtaaattcgaaatctgtcaaagatgcagatgggaaagccacttcaatttctttaaatccaatttcaatcaatttatggaaatattcttttttttgttccatattcattggatcaggtaatgattggtttccatcccttaagtccgtagacaaccatcttggagcctttgttattcgtttatctggccatgttctatttggcaagtttatagctatatatggtttatatttggtgtatggatcttttagcatatttttataaggcatattttgttgcaacgttctagtaccagtgtttgtatttatagtatttgtgtattttggagtagtactgtggatgattctaatagaactggataattttgatacaattaaattagatcttttcatgattaaaaggagagagaagaaaaaatgcaatggttaaaaacgttttattttttttttattaatattagaataatctataagttggatatataagtaggttatatctgtatatgtatgcaataaaggaaggcaggtaaaacaaatgaagaaaaagaaagaaagaaaaaaaaaaaggggggggggtaaaacgatatgaattggttggtttaatcagatttcttcaaaatagaaatcaaaagagatttatgatagataagaattagggaatttcaaaaggaagatgaataaagataataattatctaagaaagaggattgtggaggaaataaagcaaagggaagaattcagaatattagttgaaaatgggcgtattgaacaaaacagattgcaaagtcagtaaaataaagatataattgcagaaataatgctgtcagttttctgttcgcaatattataagcttttgtcttccttctttgtaggtttttgttgttgttgctttttagattctgtttttcataataataaaggattcttgaatacttaatataaaagattggttccataaaagggagttcgagtcagggatcagataaaccaggtttttttaactctattattaattttggtctttgaagattcgatgttcgaataacatagtcgttggataaaacatatcgtgcctttggtatttttttttcttgtgtcatctctttttttttttttgttctctttttccttgttgaagaaggaagggaagagggtagacgattcttcatcgaatgtaaaacttaagaagagaatcatttggcacgagtctcacacatatacatttttctggatgtaaatatatatcttccaacatccgacaaattatataaaaattaagaacatatatgagggatatatgagggtttgattgggttatgataacataattaatgataattgtattatttaaatatattatttatgtgcatgcaaatattttataaaagaaaaaaaaaaaggaaaatatatgaagtaaaattatttatatatgcagaataggatgatttcaataatataaattaaagcaatcatctttggaaatagttatgaaaaataatgacgctgtggggagttagctttcgatcaaagtttttttttttaaatgaaaaaaaaaaaatgaaagaaaaagtatgaagagatgaaagaaggaagaaacaatggtgtgtagagaagaaggaaataaaagaattgtcttcttgtgctactgccattgccacagaccgctagctactatatttggattgttttcttaatcttactgaaaaactttctgctttttagtaaaattgaaatatttgagtctcgtgtagactctcttgctgttagaatcagtacgtttttttcctttaaattattacacgttttaggatgagcagatgtagtagaatcaatatttttcttcttagataagcttttcatgtgtttatttgatggtttccaactaatgttgttagagactttattttcgtttctctttgtcttggtagtggtagcagtagtagtatcaacactagaattagttgtattagtggtggttttagtggttgtagtctctattgcattctctaggagcaatttccttctttcccattcctcaggtgttgtttgttgaatatattgaataaatctagtatatgcatctaagagtagtcccaagatatgctggatggcttgaataatataaatttgtttaggtgggatttctcgtctatgacaatcatcaaacaaacctctaatatattgtggtaagttacattccttaggagaatcgactttgatgaaaatattataaatctgatcgtcccacaattccaaattgaaagttgaatacatgtttgatgatatggtagacacgatagaattcgatcttaaagatttcttatcatcgtacagtaagaattgttttgtcattatgaaaaactctaaattctcctcacagtgtgttttaattaaaaatttattgaactcttttaatgtgtaagggtagtcgtttattatgttgctgttattatcctttgtgaagtctggtagatcattaatctgtggtggatctattttctctaaggagtgatacatatcgttgttcatattatagttggtaataatattcctgttataattatgaatcctatctggttcaatataatttaactcagacaaaatatcatataaattcggcggtgttttcatgttgatatatcatttataatgaattggcaaatttgaaaatatgtgggttggcaaaaaagaaaaagtttattatttatagttttggttttgatactaataaaagttgttttttttttgtttttatctttttttttaaaaaaaaaaaaggaagaagtaatggaatatgatgcaatgttaaaagaataatagattgaataaaaatgcaaaattaaaaaatttttttttgaataaaggtaagtgtctatctatctctatagtaattaatttttttttgttctttctttctttcgtttgttatgtaacggtaagaatagataagttttgttagttgttttattatactttattttgtttaaagaaatttaatctaatggttttctgttattataatgaatatggtgaaatcaatataagatatagtttttatcgtcttgtcatcaaaaaaagaaaaagaaaaataaaataaaataaagttaacgtatatgccttacttattggattgaatcaagataaaacaataaaatggataggagagaggcatgcatgaataacgtctagttactatcaactaatgtatacctggaacaggtgtattcaaatctatatatatatatacaatcgaacgtgtgcgtatggatgtatgttcacagccagtgggaatgacaagacaatgtgaagaaaaaaagttgcagtcaactgaaacacgatgagaatttgtatatatatgcgatggtcattctttgaagtgacgaagactttgattagatagagataatgagataagaataatgggaaaggattttaatttccataatttattacaaataacaccgaaataccgtcattaaaaaaataaaaaagagagaaaaaaaaatttttttccttcttttctttttgtagatataaaaaaaagaaaagaaaaagacaaaaacaaaacaaaacaaaacaaaacaaaacaaaacatattagaacgaaatgaagaaaaaaacacacacaaagggattttcagtgattttaagaacggcttaaaaaacttaatgattgttcaaaaaaattcaaaaataaaaaaaaacagaagaagtcatagaaaaaaagaaacgatatatattgttaaactaaaattattatgtatttttttttcttttatgcaaatgaacttaataattgaatattacacacttttttctatttttgttttgttttttttttgttgcaaaatattcttcttttattctttttttcttttttttaattcaaatttgctttgttttgttttgtctttctttggtttgttgagcatctctcttctttgtcttttcttttcattgttttatttcacattagcttaaaatgtcgtttcttttgtttttgttgtcttatcttttgacatctattgaaaataaataaatgaatgaatgaatgaatagatgaatagataaaataaaataatagactgctcaacatagaaaaaggacataaattggtaatcaatggcaccttgttttttttcttatgtcttgaacatctctgcactcagaaaaatgactgcaaaaaatgacatctgtttatgcagcttccaaaaaaaaagacaaatgcagttaaaagtagcaagaaaacattcattatggaaagtactgagaaactagcatgctcaaagtttagtttatgattgtacacacattcaatgaaacaatctggcataatttgaaataattgtagcacttataattgagatacaagagtattcagaaatacatgcagtttgatagattgactaaatactctcagaggaaaattgtgagttgtgtaatcactctatacgtgacctgaacttcttatatactaaataaagatgtatataacctacaaaaatttcttcaagaaattgacttttgtggtttctgatagtacttgattacaaagatagggtcatattaacttttagggtttttatttatgtaaacatctatgtattcttgaataaggtttttgagttgcttgtatcaagcaagatatcatttttatttcatctttcttcttatttttttttccttttttctttttttttttttttacttaccttctatatttgaggtaatttttatgtttcctggtttggaaagagattaaaaaataatgttaacaaaaagagtgacagaatacagaaaaaaagaaaagaggtatttttttttcttttgaggaatcacaatacatagaattttttttcgataatcagtatattgtcctctattgaataactaattctaaaaccttctaagaatgcaatgttataaagtatctaaaagtaaaaagaaaaaaataaaataaaataaaaccggttttcataaattataggatttttttttgttcatttgtttacatttttactttgataaaatgatagataaaggctaatattatagcaaaagttaggtttgacaaaagatcttagtatcatttgtcgatgactatttaatactaatattacagttttattaaaataacaataatagaaaataatcttgttttagattgttgataaaaatttctaaagtgtagttaacattttttatccatgaaaactcttggacatacaaaattatgttatataatatcataatgacatcagatatttatgtcatgttacaagccaattacatccacagtaaatattgtctatgataaaaataactaatgaaggaaagttagaaaaaaaaaaaaagaaaagaaaagaaaaagaaaagaaaaagaaaagaaaaagaaaaagaaaagaaaaataaatagtatattatctatttttataaaataggtcatcgccttataacctagaaattttgataaatacagatataagacatgtaaggttgcaatagtcgaaacttaccaaatctgcttgataagcaaatttgtctaaataacatgtcataaaaggctaagagaaattatacaaaggcaaatggctcctatttgagtgtatttttatatagtgtgttattcttaacaacatttgcaaatatctttcttgttctcctttccaagcaaaaaataaatgaatgaatgaaatagaagccactactattatactcaaatacttcagaaaatgcaattcagataaatacattcttactttttgttttgatacagttgaagttgagttctactgttgtcttcttagactttagttacaggctttaaatgagacattagttgaattacaaaaaactcggttattaaaattgttaaaaactagatcgccaatttgtgtttgtttctaatgtgtacatgaataattaatgaatatacaaaaaagaaaaaaaagaaaattaaaatatatcacagaatacgcaattgcgttttaaaataattgtttattttttttgctactactcaataatatttgagtgtagcttcttatagtagtaagtgcagttatcaatatgctttgagttttgtcctaattttttttttttgattatctctttaatgcagtagtaaataatcaagttggataaggtgcttgaacataaccattgtttttcttttgttgtgcttttattctttgaccttccaaatcaaaatcttgttctagttcgaatacactattacttttttggtttctttcagagtaatatccataatctggaatattttgagtactttcctcatagtaacccctttcaatgggttgatacactacatctggaggcgatctatacatcattggttgttgcggttgataggatggtgtcatatgtggattatatccatggttataattgttatttggataactattgtctctttcattacagttgcaacaccaacaaataaaaccactaatccctgtgacaccctgtctgacacacgttagcaatccacctattagccataagccaactatacacgctaaacatatcccaacaatagcgataattttacatggtttatctgccatacatgaattccagtttttgaagcttttagctgtatttttaacatcatctgtaaagtctctacggaagatcatgttgtgatattggatgaagtacttcttaaacagaaggtatatgcgtgtctgtacattcaacgatgaagaaagtcaaatgtagcgtgtcaattgccactaccaatgtttttccattcatatcttttctcatagatcaacctttgccctactcgagcgagaaattactcgattttatcgttctttttattttttttttcttgttattccttttttttttttgttttttcctcaaaaagaatctattttaaggttgagaagaaaagccatcgcaaaaacaataattgactatttttacatacaaagaagaaatctaatggttctattgtgtttcattttatgaaccagtgctaatatcccttgaaaaatgtggtgatattacatacaaaaatgtaattatttctctataacgagaatatcagttatttaacagaaatgaaaagtcgtaaagtgtggcgtaagatagaataatgataatatttcttttcttttagaatagaagggaatatggagatatatagagaaattacataactatacaacatccaccaccactggatttggatttacttgcgtcagtgttggcagtattttgatttgatggcgatgtagttcttttattattggactgtttaacgtgatgtgactgttttgaatctggattttgtacattatcttgattattttttgatattgattggccatttgtcactgtggtcgctatcggttcagtatccccttcaccttgtggttcatttaaagaatgatttatgctatcattaatattgtcattgttactattgttgttgttatacatatttgtattgttcatgtcattgttgtttatatttgtatttgcgatattttgattattcatggagtcaaaagttagatttgtattaatcttttgcatgatgttttcagtattattatgtggattatattttccaccattatctctgacgattctagacagggtataaaaggcttcttcaacgttaatattctgttttgcagaagtttccataaatggggaattcaactgttttgcaagcttcatcccatcctcataagacacttgtctctcatcctccaaatctgatttattaccaacgataacgataggaacgtagtcactgtctttgactctttggatttgttggtagtatgtcattagttcttcaaaacttgtctgtgaagtgatggaatagacaagtaagaaaccttcaccagtacgcatgtattgttctctcatcgcagaatattcttcctgccctgcagtatccaaaatgtctagcacttgtacttcgttatcaataacgacttgttttctataggagtcctcgattgtgggatcatattcatccacgaagtgggaatggattaattggatagttagtgcagatttacctacaccaccaccaccgacaacgacgagcttcaattccttgatacctgatttatctggcatatcgtagcttaatttatgtataaatgtatttatgtgtatgtgcttgtttgtttgtacccttcttcttttgtatttggttagttttttttttctttttgtttgacttgttctgttattattgctacttgagggttctttcagcagaattaagatctgttatagttcaagtttcttatatgtatatgtatcgataaatcgatagacagatagttatacgtattgtgcaattgttacacttgatctattgtaatttagtattatctttcttctggttgaatagtcaatcttaacttaaataaatgatctagaacatcactatcaagtagaaagaattgctttcttcatgtttgtttgtttgtttgtttgttttttgtttatttaaagaagcagagaatgttacaagggggaagagatgaaaggagacaagaagaaaggaggtgaaggagaccacgtggggaagggggtgagttgcaggcacaaataaggggaattcctaaaataatagggacaaaaagtattttgttttttttttgtttttagaattctttagggttgaaaagaaattgaaaaaacatatggacaaacacaacgacaaaacaagaatccaaaaagaaaataaaaaaaaaaaaaggaaaaaaagtaaaggggaaagaccggaacaggcaaatagccctaatcattttgcaaaacctaattttgttcgactccgctttaagaaagaagataaaggtgaaccgaaagggttaaagatagaaaaaactgaatgaattgatgggcaagatcaagttggtagggggttagagaatgttcaagcttctcagatccaatatttttacatattcaattttatttttatttctctaccactaatgtctcaggaaatctgtaatattttatgtttagttgtctgcattctgcttgacaacaacatcggaaacatttctgagacatttctattccgccaatttatttattccgtttatccggaaaagggatggaaaggggaaaaagaggggcaagaaatgaagaaaaaagtttccagatatttcgtcgaaaaacgatacgccaaaattggacacacagtcattatttgctaagatccagtacggtgagaccttctttcaatgggttcccccctcatatatatataaatcatattgtctcaaagttgtaagatagaatagagaggggggataacgacagaacagaaaagagctacattaacagtctacggcttatagtttgcaaacctctaaatctgactatatcattacatctatctgtacaactctgtatgtttgtgtttcgtaggttgacacttagtcttctcttgtgtctctgttctcgtctctctgcgcttttctgttcttctttttccttttttctatttttttcttgttatttttctgctgtagagatagtcatgcatcccgaaagagaattccaatgagctaattctctgtaatttgtaatattgactattttttcagtatcttattatctttgcgtgattgtttaagcacacctaagtcatgaccgttccttttttttttttaatataagttgctccaactcttggtttctctttcattttttgtttcgacccaaagaaaatacaagtatattagtatcttgaaaattaaagaatgacatatatatatatatgtatatgtatatgtgtgtttgtgtgtgtttgtgtatgattacatatgtgtgatcgttacaattcttgggcgatatcgatattatacgctagatttggacctgttgtcacttttcttctatcttgacatattctatataaacaataaaaaaaaaaagagaaaacaaagatataagaaaataccatttcattttttgatctctcttaatatttcaaacaactaatctcttaggttgagtccatcccagcggttcttaattttatacagatacaacaacaaagacaagtccttacacacagacacagacataacttgtttttacgatatcttgatactgatatgtcctcagatacctcattaagtgaatacactctaatcgaagaagaatccaatatattagaatccaagtcttcagcatctgctcctccgcctcaaaaatctgctatacgtgaaaatattaaatctttagtagctggtggtgtaggtggtgtttgtgcggttctcacgggtcatccatttgatttaattaaagttaggtgtcaaaatggcatggcaaacggtactgtagacgccgttatatccatcttaaaagatgcccgtgcacaacctagtggttcattcctactcaattcactaaggggattctataaaggggttattccacctttgttaggtgtgacaccaatctttgctgtgtccttctggggttacgatatggggaaaagaatagtgtcttggaacagtcaaggggatcaaccgttatccatgaagcaaatggctgcagcaggtttcataagtgcaatcccaactactctggtcactgcaccaactgagcgtattaaagttgttcttcaaacatcctccgaggggtcttttatatcatcagcaaagcaaattgtcaagactggcggtgtgtcttccttgtttaagggttctttggcgactttagcaagagatgggcctggcagtgctttatattttgcctcatatgaagtcgccaagaaatatttgaacacatggaacccatcatctacaccagaccaggtcagtatatccaatgtctgcatggcaggtggtatagcaggtatgtctatgtggctagcagttttccctatcgatacaatcaagacaaaattacaagctaccagtggttcgcaatccatgattggggctaccaaagaaatatatttgacaaggggtggtatcaaaggattcttcccaggtttaggtcctgctctcttaaggtctttccctgctaacgcagctacgttccttggcgtagaattgactcattccttattcaaaaagtataatatctaaaaataaaataaatagataattaaataattaaataaaaaagcaaaaaaagaaaaaagaagaaagaaaaaagaaattaacattatgtacatatatagatgtataaaaatagagaaataataagaaaaaaagaaaaaaaaagaaaaattgagagtatattgataatatggtttcacttacaatatacacagcaatcttagtggctcttattttcatactctcttgttgacatgttctttccaaccttctggtttagtcatgtcattgacggtgaaaaacttggttgtacaagaaaatccattccaagtgaaatccacctctggattacaatcacatttacctgccaatctaaccttgtcgtcaatgttacatgaataaaatggtgcatggaagtatccaacatcttcgaagaaatggatttcactacgatctaggaataaagcagcagcaatggaatggacaggtgcatcaccccatctttcgtagaaaaagccaccagctttgtccaaaaagtcaaagtatgcactgtatgctggacttctccagaagtctaaagacgcaatttcgaaattggaccagaagtgacacatgttgtaagaaagaccattgtcatcactaatgaaatccaacatattattcttggaaatgtattctggatatttcttcatgaatttaacagtagtatcccatagagttggaacagtggcttcgtattcatgaatagagatagcaaatccgtattttttaccgttgtcttccataaatttgaacaagtcataatccaaatcacaggtcaatttaataccaggttccactctccaataccactcgtattcttccatcaatggatgtctgtagaaaaacccggattcgaaacggcacatgtgtctgtacgagatggaatcaccgtaaatgatttttttttgtctcatttcctctctgacttttgcagccttatcttggtcgatccaatcagggaaggaccagtgttcctttggaatgacaccgtatttggtcttcccactgaccaaagcagatgtgacatttttgaattcttcagtgaactccacatcgttcaagaaaacccagtcgtattggaacttatgattaaatctatcttccacggatttgatagcaggtagaagttcatataaatcagagttacgtgctagtgtgacaaaagtagcttttgcttttttacctttatatggggtataagagactttttttttttgatgtagccgttatcgtccttgattacttcaatattctgtttgatagataaaccagagtttgaactgttactatcatcagcggacccgttatacaacataaacagggagaacaggataataacaatcaacccaatttttttaaacaattgttgttgtgcagtagaatgtttagcatgcaatctccccatttttgtactgtattgctactttatgcgggtttagaggaaattttgaactcagtatgtactttgaaataaaagaaaaaaaaacaaaaagaaaaagtaagatgatgaatagaagataagaatctatcaaagaagaatgcaacaagaagaagaaaaatgcatgagataaaagaatctattaaaatattattcttctcttttttgtctttgtaagatatatatagattgaaccgtgtttcaaattccttcctttagaaaatttctttcattatttttcatttatttatttttttttttttttttactttttcaaaattttctttatcttcgaaaatttttcgatctccgaaatccattcgccaaaaacaaacttaataagctatggtagcgccgacatatccgccgacacacctgccaactcaattcatttcctgcgaagagttatatgtacaggattcgatttatttgaactttctataattgaaagtgttatacaattgattagtggctctttttctggctagttttcagttgttaattgggcatcttccatctgccacgtgacactctgatagttagttctatgggtgtatggatgtataactctttttattttttttttttgatgtccgcttttctgcgatttggaagggaacaaaaaaaattttatgcagagatgtttacatattaattaggttatgaaatatatactggatacataaagcgagagatagacagagaaagagaaacaaaggaggaaaggacttatattactaggttcgaattagtttgtgtttcaacagacagtattgcttacaatccatatatagtctactgcattgagttaaattatctttttttttttcctttttttttcgtttttctcctttcttcgacagtaggaaaactgtcgttctcgtatttaacccttatctgtaagtaagatagactattaaagaaagatattgtatttctggttagttgttgtctttcatttccggtattatttttgtttttggtttactctgcacattaaagacaaataaaaaaaaagatgactacagtaaatgaatctatggtgtcctcctcaccgatcaccgcctcatatggacaggataaatcgaataaaaaaagatctatttcttcttctctactgaatttcttcagtagaatcacacataataatgaaaatgaaattaatgactcttatccagatgaagctgtacaaataaggaagaaaaaaagattaggatataccaaatcatctccttcgcataatagtagcagcgataatggtaatgatgataataatagcgattaccatttcacatacaacaaaggaacaaattcatatatggagcaaccattaattttatatgaaacagatgaccatggttcagataatcaggatatttcaataaacagtataaggcctccaatactgcctattttgcctatacagagattgaaattattgagacgaaaacaaatattaaggttaaaaagggatactgaattgattcaaaatatagattctaatggagttgatactagggatactagagatactagtgtcaaattgttcaagccaaataataataaggctattgacttgaaacagcatcaaactttatcttatccggaaccattggattttaatcaaagtgtaactataaataaattggatactccatctcccgttaaaaattcatcacatatcgacgaattgatattagactcaactactaataatattgttataaataataaaaaacgcaacgcaactatgtacaggaacaacaataataataatgatgataataataaattgattcaattgcaatcaaagcggattcctacaaaaatgaataaaaataaattcaaaggtactagatggtctggatatttcaaatatgatttatcagagtatgatacaaaaccaaagatttttgaacctagtggtatcattgatactatatctaattctactagacaaacagatgacagtaaagacactaccaaaaatagcggcaacaatagtagtagtagtgacagtgacagtatcgctaataataataataatatgattaattttgaatctgggaagacatttaagataccaatttcagaattagcagaattttctgaaacctcaattacgaacaagaaattatcaaagaataaactaaatatattgattcatggttctaaattacaacaatatgctaaacataatgaaatattaccaaaaaatgatactgttacagaagatgaaactaaaaatagtaagaagaaagaaaattcatttgtttctattggaaagatgaagaatgagaataatgataaggacaaggataaggacactaagaagtcaaatattgtattacccaccgctggttttgatttccttaagaatgatgttgcacaaccgaagaatattacattctcgtttaataaccaaaataaagttgatgaaaacaaggataagaaagatattatcacagaaaaatcactcttctctttttcaaattctattaaaactggaaaggatgaggatattgagaagaaacaagaggataagactgctggcaatgggtcaaaactatccttttccttcaatactaaaaatgattttactagcggtcaaaaagacgaacaactcgtacaaaaacatccttcttcagcagtatctattgatctgacaaaagatctcaagaaaccaacttttacttttacctcaaatagaaatacagacacagaaaataaaactttatctttttcatttggttcgcaaagtaatgataatgtcaacaacaaacctaatataaccacaccaaaattttcttttggatctactaatttgaaatccaataattctacttcaatagatactactaagactccctcttttgtatttgggactaaatcagaaacagcaaagaatagctcaaaagattccagagataatgacgataaggaaggtagtgatgaagatgatagacgtcctagaaagcggcctaccttttcttttactaccccatcgacaacagataataagaatttggatgctggtattattaatgctacagatacgattaaaccttcatttaattttggctttgctaataatactatgaataacaaggaggatgatggaaaagaaacaagtaaaactccaagtttttcttttggcttaacaaactcaaatgtagagaaaaagccattatctttttcttttgatagtaaacttaaatctagtgaaaacactgtttctgcatcgtcaaagataacaccttcagaggaaaataatctttctagtttgaattttgccacgaatgtatcaggcacacaagagacaggtaatcaagattctaaaaagcaaaacatattttcttttggtaagaatacatccagtgagcaagcatctttaaaaaaaacaataggaacagcagcaaaagcgtctagtggagggccaagtttcacttttggagctaaacctgctacaggaacttcagaaactactcaatcgacatttccatttaataataaagttgatatcattagcaatgactcatctgcgaaaccatcttttacatttggagccactactagttcaagtactggaaaactcggaagtacagttttgagcaagccttcgtttagttttggtgccccaaataaagaagcgacatctattaatactgttacatcaactgcatcattatcctcagttagcaagtctgcaggaactatggatttacaactgaataatgatgccaaatctttaggggtatctttaactaacccattactaagtaagtcaggtgactcaaacgctactaatagcggaccatctacgaatgtggccagtgctggtggtggttttaaattcgcaagacagcaggttctatctttgggtactaatattggtcaacaagatagcacaagtgcatcgggaacttcactatttggcggtaatacagctgcaggtatgaatggtatgcaaactaataatgtactgaacaataataacaataacttaggtaataatcaggggttcaattttacatttaatgcaagcaataataatagtaacaatagtactatgaattcatttggtaataataccaataataatacacttccgggtggttctgttttttctttcaataataataacacatctaacaatatgtttactagtaataacaatatgaacggctcaagttttaaatttggtcaacagcagcaatctcagataaataatacatttcatccatccagtcaagttaatttcaacttcaaccaaaatgcaaatgcgaatcctgctgaaatattttctggatctttgaataataataacggtatgggcaacatgactaatacgatcacacctcaaccaaatcaattcccacataggaagattgctcgtatgagagcatctcgtcgttgaagtaaatataggaattcatgtataaccatgtatatttatcgttataatttaatatatttgataaacattcgatgtcatatgagaatttatcgatgttacgtaaatagtgttgatgtttattatagaggaattgggaaaaattataaaattgtttaaggatgaaaatcttgaaatttaatatctttaacaatcaaaaaagtacttaaacttaaaggattaagttttttctgtaatgaagacatctagtaagatatagttgaaattgcataaatgaatagtgtcattgcaatatgaaccagttacttcagaatgtacatattccctcatttattctgggatttatcttttgtatgtttttgtctcttattcgaccaggcttactgtcgatatttggtggattaattagtttctttaaagttgttaccatctttgggatgtgtactgctgcagttttcgttatccttaagtcacagcaacaacaacaaatatggagagatcgtagaagtgtatcaatggatagccgtccggatgtagcgaacacggtaagtggaattcgtgatggagttagacaagaggctcataatgagacaggtgaatataattattttccaattcctatcacaaaatttgaaaatgatcctaaagagattccatcaagaagtgccctacaatctcgagaaatgaaggtcaaggtatcttccgatgacatcgagaacaagtatgataaaactttaagatatgagaattttgttaaaatggcacagaaatcaagaaaacgttaggcaaaaatgactacagcagaagtttataatggttagaggtgtatagtatagtaatagactattgtaatggcacatttgataaggtgacgatattagactactatcatcgcgtaagtttttttttttcttttatttttttatttatatttttttttattgtgatgatatatacggaaatatagaaatagatataatatttaaagataaatagatagatggatggatacatgaggaagagtaatgcctagtcagttccagcctatacgttttacaaaaattagtgggttccagatggaatttcgaagactatttgtttaccagttagtttattgtaaacagcttggaaagattctaatttatagtcaatttgttggatatctttggggttcaataagaccttttggatcttattaccaccgactaaatatctgactctcttgccaacaatttcagttggaaaaaccatatcttctaaaatcttgtcatgaacagaggttaaagttctagatcttggtctcttttgttgttgcctagagcctctagatggctttggtaagattcttctttcagctaagaaaatgatgtgacggtcttggaatttcttttctaattcacgggttaatttagtttgaactttgtgaaaaccagctaaagatggaactgggacaaaaacaattaaagctttcttaccaccggcaacatcaatctaaataaaataaaaaaaaatatcaaaagaattgaattaatcggttttcagaatacagaactactttctcaattaacataaaataaaaaaaaatttgagtaaaagagaatcaagtattatgtgaaaggattaaactgttagtaatgacaattctatcgaaaacacaacaaaaaaaataaaataaatgtttaaattgagagagatgtatatatacgtctcgaaatttacacatgcttcttttttcattacactataataccgagtgttttatatggcttatacctttataggagaattttgaattgatatgtcattgatatattgaatcatgggttggatagggaaaaaagatactttcctgaagagatattagaagatctataggtaacataaataaatatcatttaaactcgagatttcatttgccataatgatgtatggtggtatatacataaaaaaagtattgaggacgtggagtcgcataaggaaaatatatattccttataatgagatggatatccatattaatttttttttttgcccactaaatacaagtatatttcaaaacatatggatcactctctcatttaatactttttattttttatttatttgatatcagtatcaccaatattttatggaataattagataataatataatgacatacttctctaatagatttgaactgtaatggtcttaattcggcctttaattctggagaagaattttctaattcaacgaaggcttgagccacttgcaattctaaatcagttggggcttgtgataaaatcttgtgagacatttttgttgctgctcttatcttatagtcttacaattatccggttcttctttcttcgatgggtatgacaatatcaatacactaaacctcaagatatatatacatatatatacatattctacgcaatatgcatgctctacaagtcaatgatattgatatagtaagatttacaatgtagtttttgcccatcgagaccgtctgcgctctattgttgaaggaatctccccgcccccataggaaaagtctaacagattgagaatgcggacacattagagacgcagacacatccatcatactcaatacctaattcttgtctttacttgttttacaataatgtataaacatcatcatacacactattgacaaattccatctatgataaacttggaattgaaaagatagtcattccttagagagacagaaactggtgagaatggctatggtacaggtaaagggcattggggaatagtagtagtggttgtagtggttgtggtggtgacaagcctctgccaggagttgtcagactatagaagtctaccgtcaattggttcagatagattaaagagaagttctattcattaaacagagggaaggaaaggatggaaaagaggaaagaagagaaatggaggggagataagatatgagattgaagttaaattaggtggagagtaagaaaagcaagacatggattctcatctgttcttgaggggaatctacatggcgcacatttccaggagattctttcagggtaaacgcacatttatttgcattttgacaatttgaaatgatttccgaatacaaaaattgcataaaattcaaacatactattatataccttttcataggtgtacggatgtaagcaaataaaacggtcacatttttttaaatggttgttgtgttttttttttcttttcgttttcggaaagagttgaaagacggaagaacagaaaaacaaaaatttcaatttcgtaaagccgtggattgaatattaattacagaaacttacaatagattcctccccattatcattaatttaatcagtttgttgattcgataagacttttggctacaatgacaattcatatgaaaattttctaacaacaggaaaaataatagaagtaaaataatagaagtaaaaaaataaagaaaataataaaagaaaaaaaaaaagaaagtggtattcatattagaatctgaaaaccacatcactattaacggtgctctacagtaaattgttatatgtctagttggtttttttttttttgattgaaccctagcaagattagtctgaacagaaagtaatgtaaacggaatagttcaaagaggttttctccaaaccctaactccaatcaagtatggtagttggggaaacccagtataaattgttttccgtttaaccttttttgtgtcattgttatgcatacattctttttctattttctttttttttctttaataatttttttttgggccttaaaatttttcaaaaggccaccacttttccaattttagtccatcatactagagttcgttaatttttatctttttattttgttttaattagcggaatacatcaatacaagaaaacaaaagttttattgattcttggagtcatcaaaacaataatcaagaaagaaaatgtagccacttgattcttaaatttgtatggttttaattgatttattgtgatgaacgcacatcgctttgtataatattattaaaatctggttattctagttcttggtaatattattttttttttcttttcattggaagatatattgatatgagatgagtttagctatttatctttgcagaaatacatacatatatatatgtatgtatatgtatatgtgtatgttctagtataaacagttatgtctgtgcgtgtatactcactcatctttttcacataatatgtatgcattatcacttgtgatcaagcttaaaatatatctacttgtttagattcttcagaaaatttccttgtaatgtttgttaaccatgaattgctcattttcttagagctatcattacaaatttcagacataaaaaacaatagatttgtaattttttttttgattttaaaaaactgctaacttaaggtgtgtatataaaattaattgaaagctcatcgcaagatataagaagatattatcgattgattcaaacaagttctcattggtatactcatctaagtcacaactgagtttgattagcatagtttaagtttatattccattaatagattttaacgctgtctaattgttaagttattcacacaaagaataaaaaagaataaaaacaatcaaataaatcaacatcactatatatatatatatatatctgtgcataaacaatgtctccaattcctgctatcaaagatttacctcatctagatgatccattggaagattccaaaagaattgcggcatacagagcagtagatgaaaacctagatgttgaagttcacaaaattatcggtattggtagtggtagcacagtaatttatgttgcagaaagactaggtcaatatttacaagatgaaagattcagccaatttgtctccaagttcatctgtatcccaacggggttccaatcaagaaatttaatcttagagaatgggttacagttaggttgtatcgaacaacacccagttattgatatagcgtttgatggtgcagatgaagtagacgtcaatttacaactaataaaaggtggtggcgcatgtttgttccaagaaaaattggttagcacaagttcaaaagtttttattgtagtagcagattatagaaagaaatcatcacaatatttaggttccaattggaaaaagggtgttcctgttgaagtggtcccatctgcttatgttcgtgtttgtcatgacttaaagaatttgttaggtgctaaacaagttgtagtaagacaaggtggtagtgctaaggctggtcctgttgttacagataataacaattttatacttgatgcagattttggagagattcaagatcctaagatgttgcacgaaaatataaagtctttagttggtgttgtggaaacgggtttgtttattgacaatgctgaaaaggcttatttcggtaatgcggatggttctgtagaagtcgtaacaaactaaaaaattatttgagtggatatatagataaataaatatttaactttgtatacttgtgctatcttaagtttcgtaggacgatctgctttaaatgttactccactatttgttacaatatattttttcagagtaaaaatgatagaattgttaaatattgataagattcttttgtatttttctatatatatatatatatatgtatatatataatgtaaaaaaataaatgattatttacaaatagtcaaaagaaattgacaagtgattatcatagtagttggttattataattcccattttgggactgacaatagaattattttatattaactgataatcgcatgtgttgttagcatcaactgtcaaattatgttgtgtttagtaatacttattagtgcgccttctagtttatattagcacaattccatcagattattctgaggataataattaaattccattattaataattcaattcatttatgtggtattattccattttatttcctgtttgggttacttaccatttgttgtttattataagttgtagtatcctttttataatttgtttttgttgtattcactaataaaactctttaacgttttggttaaaaaattttaattttcttaaaatataaggcttatccaaattcatagactaaaatatagataataattgtacatatacaaatacaagttgtaaagttaataatgttatttaataaaataattacattttccttgttgatcaggttatactaataactcttgaataaaactcaatataaataatacaaaggtatcttttataagtttcttaataatttgtcgtcaacattagtctaacaatcttaagcctagagttctcagcactctaaacccttcatcttgacactcaacagtgcccagaaaaaacatatttttaatttgagtttttttcaaaatactctaaaaagtaataactctacagattaacaagctgacctataaaaaatctatatcccaaaattataccttccattatttgatattttacattctgatcgataaagaatattagaatacgtttttctatcgtctcgatgtgtatctttataaactgcattgaaaatatcaataatacaattattaaaatatgaagaaaaaataaaaatacaagatatattataaacatttaatccaactggaaattcaacgcataattttacccatttattttttctttactcttaacaaaggttccacaattaatttcgttttattattcacaactatatgtttattaaaaatattttaataaatatgaattgtgtattaatagatttttaattaagaaaatacgtcactattttaaaaaaaatacctatcattccatgctagtacagtagccattcattttatttctaacttttattggtagttttttcactttttatactgtatgaaacatacatttgctacttatgtatatgcatatcttattaaataatgtcatataataatgtacaataataaaaaaaagaccaaaatttgcaaaatgatattacattctaaattaaactttacaaaatattttatggaaacttataatagtctgtttataaacatataagctaaaaaaaattttaagaattattttggctgtttctttttagataatctatattaattaggtaggtctagttttctctcatatttttttcttgacaataaaaatacttgaagatgaaataagtaacatcaatataagtatttgtataaaaactaagaatcaactccaaaaacaacatatactacctacaatgtttaacattataaagaacagacagcaaaacaagaaaacgtttcattatatacatacatataatctataattatactttaaaattaatatatacttttttattctttcaaaaaagatatattttggatttactaaacaatgaaccttatatattgacactttttatatgatctggaagcatcaaaaaaatgactaaataaatcaaacgtatgtgattcatcaatatctattctgtataaaaaaagtacattaccatgtattaaatcaatactgatgcatatattaatttattattactttctatactatctttatttaaataagatgaaatacgaataatcttataactaaattaaatgaaataacattaaggtattacttcttagcagtattgtttgaaatccatgaaagtccttccattaaaccttttcctgtcaatgcattacttccgataacacaccataattgattctttaaattagtttccaattgtaagaagtctgatacatcttggggtttcattgcatttttcaaatcttgtttattggcaagaactaataatacaacattttccatttctttttcgctgattatactatataactcttctttagcctccttcatcctatcatggtcactagaatcaataacaaaaatcaaagccgttgtagcagggaaataatgtctccataatggtcgtaatctctcttggccacctacatcccacatgttaaatttcacatttttataagccacagtttcgacattaaacccaactgttggagctgatgttttaattttatctaattttaatttatacaatattgtagttttacctgcattatctaaccccaacattagtattttcatttctcgtgaaccaaatagtttacctaacactctggatatcgaattacccattttccttatcctattttatcctatttatattttattcttcctttttttcttactattgttatctatggaatttacgaaaatgtttattctttatttcttcaccaaactaatcaaatgtagagaacagtattattcaattgaacttattcgtattcttcttgaacgacaactatatgtgttaactgtaactcgcagaagtttgtagcttttactatgtgcctcttcttcaccttacgttaatttagtttaatttaatgaaaatttcctcgaagggaaaacaaatcgaaaataaaatttatttttgatttcatatattctgaaaaaatggtcaaaagaggtgacagctaattaaaaacaagacattaaggtcaagtgatgagcctatcttaaaaaccagtgataacatttttgtcgttgtattctcaatttaatatagcttactacactttactatattgcaaaaatctatgtgaaattttttaatcttctttattaatgttatggaagatattactgaagtttaccaactttgttgaaatacccagtaaaacatacttttattaacttattattgaataatcctaatctgcatataaataaactgacagaaaaataatctaagcataaggatgaatctagattttacgatacctccctccttacctatacatatacaagagaaattaaattctttgattcaagactataaagatgaaaacctaactattaaaggatacgagactaagagaaaacgccttctggaaccatacatacatgatctcaaaacaaccgtccctagcaaaacaccaactaatatagacagaaaacacacagtacatatcacaggtcgtaaccaaagtctctcttctaccttattggaaagaactataactccctctacaccaataaattcctcgaataatttaacatcaatagataatttttctatattatcgattacaaggtcccgatataattattataacagcatcgacacaccacaatctatgtataatgtagctacaaattcatctatttttaatacaccaggtagaccaaaagtatcacatagacatgcttcatctatacaattgtctttaccaagtcacgatatcacagatgataaaaacaactatcttcctatgataccattattaccaaggaatgtgaaacagccaatatcatctaaaggtaaatcatttaattttgataaccaattacctttttccttattacctatattaaaaggtagatctcaatttaacgaaggacagacagctattatatctttaaatgtaaaaggtaaagaaacttatatcacatgggataaattgtatttaagagcagaaaaagtagctcacgaattgaaaaagacaaaattgtacagaatggataaattattactttggtataataaagaagaagttattgaatttacagttgcattacttggttgctttattgcagggatggtagctgttcccatttcttttgaaacttattccttacaagaaatagtggaaatcattaggcaaactaattgtaagcatatcctaatatcaaacgaatgttatagacaactagataatttacattcaccaactcataacacaactatcaagataagtagaaatgacatgttcaagaacatctcatttttaaaaaccgatgatctaggtacatattcaaaagccaaaaaacaaccttcaacatttgatatatctactattgcatatatagaatttaccagaacaccattaggaagattatctggtgtagttatgaagcataatatcttaatggatcaatttgattcattggctgaaattttagattctaaaaaaatgccttattggaaaaagagccatatatggaaaccatatgataagagaataccagtgacattagctactaaagagaaaacagcaagatttactgttctaaatagtttggatcccactagatcaactggattagtacttggtgttttgtttaatgtttttactgggaatttattaatatctgtggatgagaaacttcttcaaaaacatgcaggctacgaaacattgatagacaaatatagagccgatattttattaaatgatcaattgcaacttaaacaaaatgtaatcaattatttggagaatccaatcccaatgcctgaacgaaaaaaacataaaatggatttcagttgtgttaaagtatgtttgacttcttgtaatacgatcgatacagaggtaactgatatggttattaataaatggttgaaaaacttaggttgtacagatgctgttctttgttactccccaatattaacattaattgattttggtggaatatttatttcaacaaaagatcaactcgggggtttagaaaatttcccaatacataactcctctctaaaattacaagatgatatttatgtcaataaagataagctcaaagtcaatactatagaagctaatatcacagcaatgataaattcttcacagacatttaaagattatattagactacaatcatttggttatcctattccaggcaccacgctctgtgttgtaaatcctgatgatgccactctagttcctgagttatgtgttggcgagatttggttatcttcaaaaaatttagtaaacgaattttatcaaatggataaagtaaatgattttgtatttagggcaaaattaaattacgccaaaatgttttcctttattaatgatggacctcaagttaatgacaacacttctgtagatagactagaaactatctataacatatgtccgcctaatactcaatttttaagaaccaaattaatgggttttatccacaatggcaaaatctatgttctttctttgatagaagatatgtttcttcaaaacaagttgattagacttccaaattggtctcatacatctgatatatcaagaacttgcaaatcttctttttacacatcaacgaataacagtatttcaaacattaatgcctcaaaacatagttccatttcagatggatccaactttgaaggttcagagactaactggacaacatcatacaaaggaaaacgtattgttgaaactcattacctacaacaaattacggaaacactagttagaacagtaaatacagtctctgatgtaagtgcctttgaattgaataggtacaaagacgaacacttcttagtactaatagttgaaagttctttggcaaaaaattcaaatgttagtttactaaacagtgaacaaaattttttaattaagacaaatagccaaaaggaatcatttgaaagaaaaatgaatgagttaacggatcaaatctatcgtattctttggatatttcacaaaattcaaccaatgtgcatcttagtagtaccacaaaagtcattaccaagacgttattgctctttggaattagctaatagtacagtcgagagaaaatttattaatggggagcttaattcaaaatatgtcaaatttcaatttgataatatcattcttgactttatcccacattctagttattataatgaaagcatattttcagaacatttgtcaaaattaagaaggttatatattgagaggaagaacattattgaacaaaaaaagactaatggactaaccaaatggcaaacttctggtatagattatagagaaacatcttatgattcaagaaacccgcagttaaaactgtctgactataaatcgataacagagattttagaatggagggtacgcacaaccccaaatgagtctgcgtttagtgacggtggcaatacagcctcttcaggcaattataacaatgaaaataatattcaaaaaaatatttcctagaaaatttttgacttaataattgctgccttcattaaaaaaattgttggctctaagacccctttatcagcaggtgatcatgttattattatgtgcgataattctgttgaatacgttgcaatggtaatggcatgcttctattgtcacttggtaatcattccgttgaaacctatttctgaaaaaagggcagaaagtgatatcacgtttttatgctcaatcattgaaggatacaaggtgaaaaggttatttattgatggtaagcttcatgctatgcttagtaataatagtattatttctaaactctacaagcattacaaatacttatttccaaaagtcactgttttttccaaattaaaaaaaaagaatggtgtacatagtgaaagttttgaaagtatattaaagcaaaaatacagctataaagctggaacaaatgttaacacgataccagcagttatttgggttgataacgataaagatataacaaagaatttacatattttaatgaatcatgaatcattattaaacatttgtaaagtattaaaagaaacactacaattgaaaataacaaccccaatattatcactagattcctatactagtggtcttgggtttattttgagttgttttattggaatatatgttgggacttcaaccaacttgtttagtttaaacagtgtcatgaatgatccgaaggatttcttaatggcaattcaaaatacaggtttctctgatctgtatttaaaaattgatacctttcacaaaatacttcataaaacatcaaatcttttaagtaatgaagttcattctaataaatcaaaacatgttgttaaaagtggttcgccaaatttgaggcctgatttattcagaaatgttgaaaatatcctgatttcatttattgggagaccgagcttcaattttattgaaaatctactagcaacctacaataatgtaccgatatcttcaaaccaaattaactttgtttaccaacatcatttcaacccaatcatctcgttgagatcatacttagatattccaccaatcgatgtttatcttgatcctgtttccttacgtgagggtattataaaagagattgaccctacatcatcaaaagtttataacgcattgaggttacaagattctggtgttgttcctgtttgtacagacgttgccattgtgaacccagaaaccttaatgccttgtgtcgaaggagaaataggtgaaatttggtgttgctcagaagccaatgtgtttgactattcaatttttaactccaaaaaaaaatctaagaaagattcttttataactgagcagttccagagtaaatttaacaaagaatatgaaaatggattaacttacctcagaactggtgatcttggttttatcagaaatattcaaagaatcaacagtgagggtgatctaatcagtttgaatttattgtatgtactaggtagcatcagtgagaccattgaaatactgggattaacacattttgtgtttgacttagaaaaaacaatcaaatctacaaataatgctattcgtaactgtttaattgctaaagctggaggattattagtttgcctagttcaaacaaattcagaaatgactgagaaatatggtaacttgacagctttgatggtatctgaactaatgaacaaccatggtgtaattcttgacttagtttcctttgttagtctcaatgcatctatcatattaaaaaaatatgatatgtggagtttaaacaggttatttattataaaagattggtttaatggtgatattaaaatcgacgctcaattcgctatcaattatggtgaaaatatttcaatgtatctattatctgaatttgataaagatacacaataaatacacctgttttagctgaaacaaattgtgcctttattccaattctttatcttattacattttcttatattaaattatttatatgaatatcatatagttgaagactttctctatatatcaattgtaaaactaaatgtctagtataaaccctcataatgcaatatacaaaaaaaaataaaaaaagaattaattattaaaacttttcttttttcatctctctgaagatatgttatagaatatcttattgaattgaatttttttcttaatatcattatagtagtaaatgcatggcaaatctataatttcatttgaactttcaagaaatatgaaactaaaaatggtaaactaaccaccatcagtggatattgtaacattaaaaagaatgaaacacattccatttgaattggatttgtagtatccactggtgtatatgatgcagtgaaataaatcaaagtagtcattgtgggtagattccaggtaatcgctataacaaaaagaagcattttatcatctgtccagttaagccatcctgcttttactaaacggtcacaccacaaaacaccaaagattggcatgacacattgtctcaaaatgactaataagcatgctgatttccaaaaacccgggtatagagtcccgattttcaaccgacctaaagtggcacctaacaaaagcaaaccaaatggcactgatgccgcacccacataactggtgtaatccatcaagaaacttaatgcaggttgttcatctggtgcttgtctaatatgaggagtagttggtgtagtgacaaacaatgctttaacccatggaataaatgcaataatcaaagcaataataactgccatagaacatggtcttaaacagtttttcatgaaaaatacaattaatgaaaccaatggaaattttcttagccatttaggtagggaagaacctgattcttctatatcttttttactgaccgtagcatctgatgtcaacattttagtcaaattggatgatttaattctttccaatgtagattgatgagagaatgacgaatgaatactagatgcatcagataccaatgaagatcttctaggtctaccaaattgatcaacattagaatattcacgaataatatcttgcattgtttgtggcggtaagtcacgactttcaatagatctcaaagatacaacacgatccaggttgtttatagtattttcataggattgataacctgtggcgatatttctatttctgttctgcttatgaaaacgttgatgatgaaagttcctatttcttctattttctggtcctttcgaggttaatgcaataggttgggatcgagttctgtcaatattatctctaacatcataagttgttgaatattcgtcactatcaatagaactatgagtacatatagaagatgcaggtaaggattctgtagtcaaaagagaattttgtattgatacttgatcatgtaaagatgtattttcattgttactgtcattttcgtttaatctgtttctattactgccattattattattatcagtagcatcctgcttctcatttctacgatatggttgtgggattgcctgcatttcgttgtcatccagtgaagattctaaagattcactattttgaagcgagtcagacgcagaatttgaatttctttgcctcaatacattattttccttttctgaattgtcgctctcaatactattcccgttcttttcatctgatatcgagtctgataaagaactatgttggttcaacgaatcgtcctgattactatcattattattatcatcattatcatcatttgaatattcatcctcatggactgcattctcctcatcattatatttaaaatcattttcaattagtctaaacccacctaaattaaagacacaaatcaaaaacatggccaagaagataataacattagcaacccctttattaccttcttgtggagtaaaaataaaaccttggtccatggtttgaatgtaagcaattggtaaatcactaatatttggaaacatcccacctgctaaaatcccaccggaccattgttttggtacaggcataacttttctaattacccaagcaaaaaacaaacctgtggcaaagattaatacggaactcaaacatataatccccacgtttttaatatcattatcttcaatattggccacaattttattaaatgaaagacatggcaaaagaattgttaagacgatatcactaattgttcttgttgcttctgcagttaaaatattcattcgagccaggaaaaaccctgtcccaataattaaataaattttaataattggcttcactgaagcccaaatggcctgacctaatgtaatatgcattgttataaaatcaatatgaaagaaaacaaaataaagaaagaaaaaaaaaactagtaattaataatggtttctcaaaaaaaatatgttcttatctatatcagatcttctttttttctttttgttgttttttaatggttctttcaattttagtaaaatatgtttgaactatgaataaaaaaatctacaattatgagtagtaacgaatcttaatatttatatagaacgaataagtatagtggcaatgtgaaagctcaataatagcaatagaattactgcaaaaatgttaaaatcacacaataatacttgatgataaaaaaaggctacaaagaaaaaataaataaaaaaaagagaagtattaattgtatagtaagcagacgtaataatctggacactgtttatatctatatgtgtatttatataatgctatattggttgtgcaaaaagacaaagtatgttctacgtacttatcagtatgtaaacaacaacacttgaaacgcagaaaagtacaaaactgactcaaataaatctaataattagtacagcagaaacactgatatgaaataattaatcaggaagttgatattaatttgataggtagagaaatagatacatatcgttggataaacattatatataaagttgttaataacagagagctccccaggataagtgtatttcccttcttctttctatttctttctttgacagattaatgtatcgttgctgattatacgaataataaataaaaaaaatacttaaacatttggaaaatcattctgtcatttctattatttttttctcttttgtttcctttgcctaattcagtaattagaacaatagggaacaaatgtctttatatccagacacgtgggatgactacgaatttccgtgcgtggggataaaagaaggggttgtttaaagagtttacagagtttccagagtggtgtactaagctcattagggtttatcttattttttactttttgttatcttttttcctttttgtgttttttgtttaaccaactctacaatgaatcaccaatatcgtatttgataaagatagtagtgaatatttgagattgattaagaaggcattgaatcagtcaaatatccagcaccagatttagatgcactttgtctttgacaaggtctattttttgttttgatctttttatttatttattatttattttttcttatcaattaaatgaaattacccatttaaaaagttcatactgttttagtatattgataaattacttatttattactctacccttatatctttagtacatacatacacataacttcaccaatgtcattctcttatgaaaattatatgaatctgatatggcatttaaactatagtaaagaaacagtaccgtctgatattgccaaaagaatagtatcgcatggaattgcgcctgttattactgttacatcaacagcagatctagatcgtcatattcaagacatatatgggctagattctatgtatcatcttctaagattctttggtggctgtgtatctgatagagatcaagccaatgaaaaggacactattctgaaatcttctaataacaatgataataacgatactactactaccgccactagtacatttttgaaagttcctgaacaaaatattcctaaccaaagttctaccgtcactactccgggcaatagacgaagaagcaattctaacagtctgttacaaagagatcatactcagttacaatttataagattttcaaaatctttacctgatctattatcctcactgtcttcactaagttacgagaataaagacactgatgtcccaaaagggacatcacttaactacaaggaacaattattatcagagaaccattctttagaaatatttttacgagattatctacatatcataaatgaaaatacattatggaacacagaccatcttcttctaagaaaatctatttatcataattttttctcccaaactttgtcatcaaccaaagatttatccccatttgaatcctttaatcatcctattgtctcattgtttgcactagatatatcaaaagaacagacatatgaagatgcaagagaattattgactacttttaaaaatttgaacaaaattatcgataatttcccaccttatcttaatattaacgacattttacctatatttctgctatgctatgatgcagattcaacggaacaaacagaaacatgtcaaagtttgattaaaaaatttaaaaaacagttatttgtagagagtgtcatgttacctctatggaaaaataatcacatcaatcaggagcaagatgaaatggttccatataaattcttacatgaacctgtaatgacctcactagatgaaattttaattttattagccaatccaggagatttgaatcgtaaatatagattaccatccgctattatcaatgaaatttacaatatgttagatatcctagtctatgatcttttaatcccatttatgcaaagaaaaatttcgtattggaatgaaacaataatggcaccaagaaaatctatctttcatggatccaaatttttgaaaaggttcattaataaatcaaatcaacagcaaattcaaacatataagacacctgagggaattgaccatttcttagcatcttcaaatgaatttttgttaagaaaattggcggattggtccttaatgatatccgattttaaaactgcctatacaacatatgattctctctcaaatgatctggacaatttccctttatatttggcttcctgcttagaatggtgctctgtgtctttactgatgggtgcacaaagtatagtaacagttaaaatgatcaaaaatgacatcacacctttaattgaaagagccgtagaaatctataaaactgacaatagaccaattttagagactagatgcatgttattatgtactgaactattcctttcactaagcgattcttggacctccactccatatgctattcactaccttgaaacgatactatctgatggtaaattaagttctttagcaaagacacttatatgggaaaggttaagtgattgttatgcatcaagaatcgacccacgagttaggtgtaaagttgaaaataacattaatatcactagtactaacaatgacttagtttctttgtcaccttcaaatgaggatggtaatactcttgatgattacatcctaaaaagatacagtatagatattttgtctaaaggttttactagaaacagaaaagctgcattcttcagattaattgcagctaaaaaatgggcagaacaaggatattggagacaagtacattggtgcttaaaagatatccatcatatttatgagcatatcggtttatatgacagacatgggttaatgttaaaaaatttacacgtaaagctacaagagaaaatgacactcgaaatatgatatcgctatgctaataatatctcaacatgcggcatatatttctataaaatacttatatatatacatataagatttaagtacaataatcttataaaatcttttgcttggtgttcgtgcaagttttattcatttaattactcatttgatattttttaactaggtccctatattttctttgagttttaatcatatctagatatatgttgtattttacatttaatagccccttttcataatcattggagagtttctctacagaataaatttttcccgctggtgtagctttagtcataacatcccacaaaatatgcttatcaacatcctttcgatttgaactaaatatcttataagcacacatacctaagatagctgagccataagctactgcagaattagttgacgaagatttgttaattgtcttatgttctgggattatgatgtccaatccagtactctccatcattaatctaattaacatatcattatttacttgacttcctgatatataaattgctttaatacaatggcctgaattaatcattgtctcaataatatgtctagtttgtaatgcgataaattcacaagctgctaaatataacaatgaaagggattctatcgatgtatctaacgtttgtccgatgataacggccctcatttccatgtctgctaaaggtgatctatttccatgcaaatcaccgtacataaataaatcactagtcaaatcactaacagatttgcaagatttctcttttaataatttaattaaagtattattaaggtaatcatacggattttggtttgatttttgacatgcatcaattaattccttatatgaggggtgagtagttaagatatgatttaataaagcacctgtacaactctgtccaccctcggttacccaaaaatcaggcaataatatgtctttatatggtccccatacaccaggaaccattatttgtctatcagccataataatatggcaggtagaggtacctgctaccatagccaatctctctgtcctcttgatatcactattttttttaaaattcaatggaattgatgctacagtaccaatccaaccagcataggcatcaattatacctgaactgacgatgcatgactcagttaaacccatatcatcggcgacaactttagacaaacatcccactggttgacctgcagaaagaaaagaatccttcttctttaaagaaccaccaagactaaaaaagttgtcctcaatcaactcattcaaaccaattttctccaagaaatctgtagaccaaccatcaacggaaccgtctgatccagaaggaagcataccttgtttacatacagcagaacatagggaccttgtttcttttcctgtggctttataggttaaataatcaggtaaatcaaaaaattttgcatttttaatagatctgaatgcctttaaccacttaatctttggcagttccatctccacagacattttacctccaacatatttcaaacatttatcctgagtagaattaatgaagtcggtctcctttctagctctatggtccatccacataattatattttgatcgttgtctgaaaaatcaggacccacagctagtggtaaaccagtgtctttatcaacgactactaatgaacatgttgcatcaaatcctatgcccaagatatccttaggatctatatttgattctgtaatagtgttcctgacacactggcaaacagaattccaaatactggtcgacgattgtgttatataaccaggcttcaattcctctcttggaatctccaattcatgttgagttaaaataagatgatcatgaacaagacaagctcttaccgaacctgtaccaacatcaacaccaatgtaatagccatccattttttaaatgtttaatttttaaatactttatactttatattttataacaatatatcttagattagacctattaaatctcacagttcatttgatgaaaacaatataacaaaaaaagaataaaatagatctcagttgtagataatcacttaatagtgaatactttgaaaattactctttaccattttgtatcatcgaccaattacgttcagaaaaatgattattctagttgttattttcttattctttcagccttttaattgcaagatacctatctcaacaataatctcttatattctcgaggtaatttccaaaaaaaaaatctcttaatcgtaacgaatagagtatcattaacaaaaaaaagcactattttaaaaatagaaaacaacacatgctctttattacatttattaacatgacaaagataatctaaaaatttagtggtgtttagcgttggtcagctattatcaataacagtttcataatatatataaacaagtaaaataacgagtaaacaatttccttggtgtaaatggggttagtggaaacatttcaaagaaaagccgccaaattaggtcttttcccaaaacttatacgacttttgcccatattctcactaattactaccattattagtataattttacttttaatattaccacttgatggacaatacaggagaacatatatctctgaaaatgccttaatgccatcacaggcctacagctattttagagaatccgaatggaatattttaagaggttataggacacaattacaatcatttagtaataatagtaactttgaagacatttccaatcaatttgcacagaaaataactacatctgaagaaagatttaggactattgaatcctggttgaatgaattcggtgtcaaaacgtctatatatcgtaataatgctactggtgatacattatatggtatattacatgccccaaggggtgatggcacggaagcaatggctctttgtgtaccctggaaaaatagcaatggtaatctaaatattggtggtactgctttgggtattgctttaactagatacttttcaagatggccaatttggtccaagaatatagtcattgttttcagtgagaaccctaaacaagcattaagagcatgggtggaagcttaccacacttctttagatttaactggaggttctatcgaagctgctattgttttagattatcctagtgtcaatgatttttttgattataccgagatacattataacggattaaatggtgaactaccaaatttagatttagttaatattgcagtttctattactcaacatgaaggtatgaaagtatcgttacacaatttactaaaggatgaagtagatgaaaataattattggtcaagactgaaattgattctcttaggtatcaaagattcaactctagctggggttagaaaggtccatggaaatgaagcatttagtggttggagaattcaatccattactttgaaagcatgtggcgacagtggtaatattgatataactacctttggacgtattacagaagcaatgtttagatcagttaataatttattagaaaaatttcatcaatcattctttttttatatattattaactcctaaaaactttgtttctattagcagttacttaccaagcgctgtattattatcaattgcgtatgctttagcttcaataaattcgatattaaatacaaatatatcctttaatagttacccatcatgctctatcattgcaggaattgtttggctaatctgtataataggaactttcataattggccatgtgatgctttatgccacaagtactttcagttttgtcctattattaattggcaatataacaatagtcatgtcccctctagtgttttcaaaattcacttatattaaagaaccaataatacaaagaacaaaagcccttggattcctattctttagtttaagtcttacatcattattgatgttaaacttttcgttttcttttgttctaggtcttctagctttcccaatgacattagtacagattgttagtattcatgataagactagtatgtctaaaatacaaatcaaaaatatgctattccttttagtatcgaatccatttatatctatattaatttttactactatattcgaaagtgaaaatttcaaaggtttagaagtgtttccagcattaatatcagcatggaaggacctgaattgttggtcttggtttgtactttgtgtatcctggtggcccacttggttattgacagttttctccacaatgactactataccaataccaattgttacaaatgattctgaagatatagaaattaagaaagataaatgatttccaaaaagacatattctttagttgtagtttcattgaataaatctgctcactttactatctacatacatattaaatatatgtatatatatgttcaacagtatatgttatatcatattatattttatatatatatatatacatctttgtcgagctaaatgatttcctatttgggaaagagatgagcttctatcgaaaagctaatcgaatattaaattaaaatttttatgtcgactgttatagatcatcagaaagaagaagacagaaaaaaatgttatagtacttggttactctattactaaatggtattgtaccgaagctattttatattgttaattatgacaaacttatggaactttagctttttaataggtagccaaaacgaactatacatgcatatataacggaaaagacaaagaaagtagaaagaggaaaatagagtgaatgttattccgagtgcgttgtgaattaacctgcattatagattatatgatatggattctgctttagaaaaaaataaggaaagagctgatttattagaaagaaatttaaattttgatcctgcacgtcctagattgaagagtcaacaaaagggcagacatgagcctgtattaatcccattagttggggaaagatacactaaatacatgggcgatgatgttgacaaagaatttttacaaagaggtgaaagagaagtagtcaaatattgtcaaagtattaatggaaggatgactcaggatatgtttgagttatttgtaaatgaaaatgtcactaaagagactatacaacagctatatccttatgacaataatggtgatgtaagtcgtaaagttatgtatttacatcgaagatattataaagatgaaaatgggttgatccgcgatcaactgaaagacaatagagtgatatttaatcctatttacacatttgatatgattatgggatgccatcttttaaactcacatccagctgctcgacatgttcaccaaggtttatgggaattttatgctaatgtgagtcgtgacttggtcgagaagacggtgcagttctgtacgaaatgcaatccagaaaaaaaattaacgccactggtaaaagtcagatcatttaatgtccataatgggttactgccattagaaagagtccattttgaaatattcgaaccatacccaggtgagttgatcgaggggaaatatagtcatgtgctttactgcagagattattattctagatttttgtggatgatgccattgaagagtactaagtttaaaagaattgttccaaaagtagctgaaatgttattacttttaccaagattacctatatttattgaatcaacttctctaaattggcaagacatgttcgatatctttgagactattgcaaagaagtactcgttagatattggattaggtactggacaaaagcatgaattgtttcatgtaggatcactaaatcatactagacaaaggtttcttaaacacaagaaggaggggattaaggattggaatatgttacttttaaaatgttgtaaccgtcgtaattatctatacgatattcaaattagaggtgttccagcaaattttctaagttgcaacgttcctaatttgaagcagaaatttagagtcaagagatctaattatatgtacaaagcaacaggttcaaatattgtaaaggttggtaagggatgtatatatctggaagtcgaaaatgaaaatgaaaacaatgagaacgacgaagggcaacagaatcaagaaaatactactagcaatctcacaaatcaagatgacgcttttgaaattatgaacagtataagtgatagtgatgatgaagttgtgattgccaaatacaaagatatgcaatcggaaagaaatccttcaaaagccatgaaacaaaaaatagtaattgccaaatcttcagatgacgttacaaatacaatcattaacgagaaaattgataacacccgagatatggaagatatcaatggtgatactcttaccacctctattgaaacattgcaaagaactaataatggacttaatttagaacaattaccacagagtactcaagaaatggaacctgtatccaggataacagacgaatcatgtgaaatagtagattcttctactgcatatattcaaaatccatcttctgatagacgttcaagagacatagatgatgaagaggatgaacctacaaaaaagaaagctcatctttttgtcgttggagatgaagagtcgaatatatcaagagaactgtaagaaaaaagaatattaaagatatgacatggctatttataataatagtaaaaggaaaacaataaactcctcttttgatgtatatatgtatatatatatatgtactctacattaattgaagtattcctatagtgaactttttaatttaatagtaattaaatgactttataagcattgaataagccaataagtagtaaaaaagatgatgtattgaaacatgcaaaaccaataaataaaatggtaaaaatgacaaaaaaaatgatagtgaataggaaaaaagttcaatcacggtactgatcataaaattctttatggaaagtttcccaatctttaatccattttgtacctggcgccaaaaaggttgttcttacatgccaagtaccatcaacttgaccaaaacccgatcctggaacagtacatatcccagtagcttctaacagacgtaaacagtaaaattcatccggtaacagattcaatttttttgcttcttccaatgcctttttaggtagtaataaagttgggaataaatacattgcaccttgtggtttttgacagttaataccttccaatttggaaaaaatttcatatagcaaaaacccgcgttctttcatgttgttatgaattgttagtctttcagtcctgtctaattggtaagaatcatcaccttcttttggtgggtccaccattaaatccacaagagcttgacctgttacgacagaacatattgaaatggatgctaatttagttatgacctgtctgacttcatcagtaaacccaacaatttccatataaccacctctttgaccacattcaccgaatacaccttttgatgtcgaatgtaaagaagccagctgaacgttctcatagccagtttcgtctctttgtaaagttcttaaaacctttttcatagaataaaattggacttcttcataatatatattattttgataaacctcgtctgcaatgactacaataccatattttgcagccaccttaaatattttagctatggtatcaaatgataatacagcgcctgttggattacctgggttaataacaacaatgacacgaggtttgattccttttgcaatggaatcaacaacaatctgttcaatttcgtctgcattggtggaccaatttgaagattcatctaaatagtatggtaacatagtagcattatacatagtaatagaagctgtgtataatggatactgcggtattgggaccaaaataccagtagatttatctttgcaaagaattgaaagtaagtaagtggcggcttttgatgctccatctgtaagaaatatatcatttggatccgcaggaaacccatctctacgaaatatggagtttgctacagtttctctaataccatagacaccttgggtacatgtataggcaccaactgatttaccgatctgtgttaataatttgcatgctctgtcgaatgcatccttcttgtataaaccattcgcaattaaaacatctttggattttataagttcagggtattgcaagattgaaatgacttgtcttgtaaaggttaaaggcttttgatctaattgctgtggattaccaatacttgcatagaccacattattgaatggtaaatctccatctgttgttgtgctcaattggaattctaactcttctgctctagttggaatagcacctctaatagcatattctgcatcaataatattttgatttaaatcacataaacccaacttgggtgctggttgaaaagtttgttctaccatgatattctttaatatttctgtgtctgtttctttatgatacaaaatgtgacaggcagaagaagaggaggaagagaaagaggtgggaggaaggagataaagttgtgtgtttgtaattatggttatctgctagatattatctaagtcaatttattataatttaaattactctacacaaaaaaaattttttctcagaaacattgtattcaaatgattatagaagatgactcacaggcaccgggaataaatattaattcttatgttgcttttataataagcctgagtcatgttgaatgcatccaattaattagtcatcggtgtaattgctgcaggaacgacctccgttaaaaattttctcttatttgctcaattagacatttatttctgtggtaatatttatgaacgtgtaatgcattgagcaaattaaataaaaaattgtaataaaagatatattattaatatatggaaattgtatatagttcaaaatgattagcaaaagtgtatatatgagtaatgatagtaataataataatatttatatatctatttatctcaggggattaatgagtaacaattttagtcatagatgttatttgatcttagttaacgaatatgatatatattaagaatatgataaatagataaataaataaataaagtgaaaccgttgttagtgttacaaatgtatatgtatacatatctatatgttctccctttgttctttctttttttctttttttcttattgtcgattaaatatcattgtcaattagatctactatatcatcgtcattcaatccatcgccattatattctatatctattggtaataaatctaatggttcattctctgttatgtagctatcttgctttaaagtcttattatatgatatcttagtgttatgatcattatgatgatcatcatctacactagtatttaaacatgtttctaatggtaaaagtgtaggagatactattgttaattctttatcctgagaattattgaataggttattatttagtataaatgctgtattttcttcctcttcgtcatgtttcactatggttccatttattaaaacattatatggatgatattcagacaacttgtttaaatcttcttgtgaaaatggtatgtaaccatctgggatatatggtatttcatctacgtctttcgatctatattcaatatcatcatcttgatgcacatcactcttcacgttggtatttgatgctttcttatctaacacattttgtaactttaatttcaatgaattattcttaaaatgactccattcttcatcactcccactttcactctcactttcaccacgtttactaactttatcagatttatttgaatcgatcggatcctttaagatcaaactttttgttcttggtaaattaatactatgggacgatcgaagcgatagtttatgcctattgttatcgttgttaatatccaatattgacccatacttcttcaatctttttgtattatcccttcctgtatccttatttttatttctatcaaccaatggttgtttaacaatattactaaacaggtttttcgatacgttgaaactcgaaacattattatcctttgcagcaaatggtaatctttttgttggtgacaaactagcccctcttttactcttggttctcgttagcccatcaagactttgtggtttcaattgctgcaatggggtactaggtataatagagttttctttatctgtgtggacaatattattcatattttttattttattatctatcagtgttggacccacgtcctatgaaaagtaatctgtttaataatttaatggtgttaacaatctatttaatctggatcacttgttttctcggttacctgaataattttttcaacgtctttcctaggatcacacactctttctcctcttttgtatctttttatttttattttatttctcttttttctcccttttcaaactttgtttttttttttgttgatgttatttcgagttgagaataaaacaagccacaaaacttatgaaaaatctaaggaaaagttgtctttttttttttatttttattttaatgaagaataagcaagatctgttgataaaaatggacataaaagagtacttatgcaagacagtagacgttgggcggttgcctggccttaagattgtgtgttttggatatatacatatgtctactccataaaactaactgcaaatagagagtggtgtcttaatttttcctgctattcttcttatttattttctttgtgactgtctgaattctacaagtctctactgattcatattccaacatatatatatatacttactccctttttacattattgaaaacataacgtatccatatatttcaaataaagatgtcccttgtatcattctatggaagatctattttggctcaaggtattaataagccattggtcctcaagagtttattgtcccctgttggtgttcccacttcaaattctatcgtatcatcaatgaataatggcccattatctgccattgaacaaagaaggtggaagtctcgtggtaacacatatcagccaagcactttgaaacgtaaaagaaagtttgggtttttagccagactgaaagataaatttaaatcaaagatgattaaaactagaaaagataaaggcagatggtacttgtctcattaaactgttcagagtcttcctattgtgactattctttttgttttactgttccatgtctcatgtaaatatttttttatttagcatctaaaaagtttaaggaatattctttagatatatatatatatatatatgtgtgtgtgtgtgtgtattgatgacgttattattttattttattttattttgtgttttatatacatggtaataataaaaaataatataaagatacataatatcattgactaactttattagtatgttatttcatttttgatttaagtctcattcaattttgcttatttaattattgatagactaatgtcctttttattattttttgtttgcttgtttgcctgcttgttcgtttgtttttgtccatttaaacaaaatcaatgaccaatccaggaccatgtgtactagttaaagtggttcgccctaagatactaacctgatgtttctttgcagctttatccttttgtattttagctgcatccatcactgcatttctagctgcaataatattttccaaaatctgttgatctgacattgaacatttgccaacactaatgttaatggatgctgtctcagtaccatgctgtttaaatggtattttactaacattattttgaatcaattgtaataaatcttcggctacagtgccctttttaacgttaggtaagaccccacgtctacccagcaatttacctagttgttgattcaatttaggcaaaatatctgatgtggcaaaggatttatcaatctcagtgaccggtaaatctccattaactatcttatctattaaatcttgtccacctgtcgccatacataaagacgatactttttgcaatttttcagagtcattactaaaagcaatgattctagaagcctttaagggatgaggcaattggatatcgccattcaatggagtcacacccttttcattaatcacttgtattgtgatagagatagtctgttgagattctggttgacctacttccaatgctctaatgattcttaaggcattgggaatagtcacatataatgggtcggcatgtgcaggtaatctggctttaatcttttgtttcactttacgtttcaattccctgcgtttcaattgttctttagttaacttacttacgtttgaattgatggatatatctaaggagtcatccatttgcaagatcaatctcttgtttgtggtagaaaataaatttttcaaaattaaattagagaatggtaataaccccttactcgaggagaatttaagcatgtttgataacattggttatattaatatcttaacaatatgtattcacgatcgtaaatgtcccttctttactcttttctcggatttggctacttcagtaactttctagtgaaggccaggtaaatttagccacacttttctcttgacacttaattactcttaacttatcgagaaattgaataattcctcgatgaagacttagatatatttaacttgacaacattgttcttagttgatctacaattactcatccgctccctttcaattttattttgttctcttttcgcacaaaagaagctgtgaaaaaaaaaaaaaaaataaagaaataaaataaaaatgaataagatccttcgagtttgtttcaactttttaagaagaacatagagagaaatgaagagggaaagccagaaagaggcaaattggttagtagtttgtccgatatgtatactctatataatcgtacatgtatacaatggtctttaatatttattatcttaatgttatgtataagttttgcatattatatgcttcgcctgttcatttcattttctatttctttctgttcttgttctttaatttattttcaaagtcaatccatttattcggaatcccgattttatcatttaagtactggataatagttgatccatgcggcccttggatttgcacctccaaaccaaattgaggtgtttcgctgatagtagttgaaccactacataattttctcaaatcagaggcgattttttctgaatctatattatacacttcaaaattattgattcttgtaactatctttctaccaatcttcagctcggtcacaatattgatatgtgggacggaacctctctttggagccttgaataatggggtgccagctttatcaaaaattttataatattcattgaaattgttagttacaatagcttccattatttgggatcttgggattattctatcgaatttgggtgatttaacacttttattaaccattttaaacaatgaatcatccaataagattgtctttggatttttttgattcactaaagaatactttttgatataaaaatctatcacctctttgatagtagaaattgtataatattcagtttgtacaaagtttggaggattatcttgcttctcagaatgtatacttgccaattgttgtggcaaaaatgttttcatttctgatgttggcttatataatgtttctacagtgaaactattattagcagaattatttttttcggtcttattactatttccattgcctttattattcacatcattgttgttgctgttgttgtttgacatttgatttgaaactttatatggaacaaagtttttaatttcatctttttccttattgacttgaactattattaaatcatcaccctttccttttaattttaaaaacccttccttttcaaaatgctttaaatatttggctgtcttcttccaggaacttttctttacattgatttcttcatgatttaaattgggtggtagatttttcatgatatgattggagataaaagttgaggcattgattggtgtactcaatatttgatcttgtttaattgtatagtacagagttcttgtcataaaataatcaacatcttccatgcttaatttctctaacacttctgctatttctttaaccttgatgttatgatttgaactgctttctatgatggcatctgcagtattattagtagcaatagatgcaaaattattcatttcttcatcgtcctgcactatatttgtatcctcatggctttcaatttgagtagagtcagggacatctagtcttactttaaattctttaaacaatccgtcctctaaatgatgaataattttaacggcaacaccactctgacccaagacaccaatttcattgtatcgagtcaaatcagccaattctactattccaatagccagaactacatttggtgaaattttatccacaataccacagatcacattttgttgtaaacgagaatcaaatggtggtacggtaccagagatcattaagtttgcaccattaaagatatggtcttgtaatacaactttatgagtcaggacagcaggaattaatctaggatatgaccaacaggtgtaaattgttggatagatggtatcattatgtttctctttgaagaaaattgggatattgccatcatcgtcagtgtaaatggttccctctgttactgttgacacaaaattggtttgtttaataacatttgatcgaaatttaaattcagggtcattgaattgtgtttgaatcctagtttgtaatttctttctttcagaattttttaaattacttaatgctttcactctaggttcctttttaaacattgttatataacatatagtgtcacttctggtttgttattccctgatttatgttcaactgattagtcctgtcagattaaccgtacttgctcaaattaagacacactatcaacaatcagaaaagaagtatatatgctttcttttaatcggcgcatttatatgttgaatatattttgttttcactctttagttttaatatttatgtatttttttggtgctatttgaaattaaagaagggacacttgcatatatgaagaagcatgtagagtgtagaagacgtcaaagtaactgatcaataggagatcgtaagtgtaatatttctattattattgggtggaagaaggataaagttataaaactttttatagttgatctcctccctaagaactagccagaaaacaaagaaaactaaattaactacttggttatttaactaaaactgtatccttctcaccttattgactttgaattctattcctagaatgttattaaatgggttgttgacacctaaagagggatattatgctacatttaataaacaattaaaagtttatgctactagaggagaaaaatcaattcaagtgaaaaggctccataaaggtcttactaataacaataataataatgataatgataatgataacaataagtctcaaaacttggtttcctcaatatttattagagacttgaatcaagtggtcacatgcaattgggacctgattaatggtaaatacttgactatattctttaaagatggatcaattagaataaatgatatgctccaaaatggcaaattggttgcctttttacgcacaaaattaaatgatatagactttgggtattgggatagaataataattagaaaagatcgatatgatgaaaatgaatcaatgtcttttaattatgatattttggatctattgcctaaactggtcaaatataattcaaaggatgagcctccgaacatgtctttgtatgtcccgcaagtccctatctggagaacttacaaacagaaaattattgatatccatcttttacatcaatctgtcacagatagttttgtgctggtaatagatggtgaatatattattaatttatccgattcaaatcctaataagaaactttgtaagatattaaaggaaaccgacggattatatagctgttactatgaaaatggtttcataaaagagattgatgtcaggagtatcttaaacaataatagtaaaggaaaatttttgactttaatacaaacatactctctaatagatgattattttgaattttggaaatatcatattaatactatactacaggatttagttttaccatttttaacttttacacataaactaaaagatgaagagatacatggttttaatatatatgagcatttggttacattgttctttgatgggatagtgtctaataaattagcagattggctaaaatattcattaagtgagaaaaatttggagatgttacaggttatgattgatcaagcttataaaacaacaacacagatattgatgatgtgtattattccggtgatagaaaggctacttatattaactaatcaattacaatctattctattatctatacaattaatcaatcaaggaaaaatggctgaattagaacagatctcaataatagaggctaaacagattataaaaaaatgtcaagagttattaaagaaaactatagaaaaaatcaaaattatcactcatgagaattctttattgaaaatattattaatatggctagatgataaaagaaattctgtaatagatgaggatcatatagataatttggatattaacagtgacagtagttatggattccaaattatggacggtctcgacataatattcggacgagacacaaaatatgacatattagacagttcaacatttttagaaactattaaattatgcaaagatcaattacaaaaggttaataaactgtatgttatagaattattgactagtggtttagtgataggagattttatcccatttatgaatcatatctatggatctaaatttattgcattgttagatattgaaatgactactttcggagataaccaaataataatttatatagttaaaatattagacaatacagagtatcagataaaattaggattgatggactataatgatcatagtgttaaaaaagatgtaaaaattccgtatgcaaatattgaagatgtaacaggtatacatattgcaaatgatacaattataaagaaagagtacagtgaaaatgatgaggatgttgctggagacagtataatctttaatgataaaatatgtattattacacagtatcatgatactgaatataggaagcatgtttgtcatattttaaaagagccattgtcaccttttagaacagatgcaaatttaaataagcatcatgatttactgaaaagttttataccatgcatggaactatcattttgtggtgatacattataatttaaggattacttacttaatgaagaacgaagtataaaggaagatatgtcgtttatattattatgtattttgcataatgaaaactatcatagcatacgagaatactaaaaggtatacaataagatcttgctatttcctcaaacaaagatcaattcataacattacttttcacatactccaatattcatgcatatatatatatgtgtgtgtgtatgtatgtatgtatatgagttaaggaaagatagatgtcaacgattaatttgtgatactttgcctatttaattagtatctcatcgctgcaattttgtgttaaaggagagaaggggggaaaaaataagtgcaaatataaaaaaaaaattcttttagatatgtatttaggtacgaggaatactaacctctattgacagcctttcgataagaacagaacccttacgatatatagacagtttgatgaaagaaaactcattattaatcggatgtggtttgaatagattgctttatagtcatcatcaatttatttaaaatatagtttaagataaaaaaagaaatattatcttttaaaagtatagttgtttcacacaaatagcagagatacaaatcacgcttgtactagttgttactaaagatcagctgttaccaattttgtatatattaaacaatgggtaaaaaggataaaagacgtaagagaatgaaaaatttcattcaaaacaagcaacgacaagaaaaggctaaacaagagcaggtcctatgtccaactgaagataaaaatactaacaacagtaatacaaataatgaaaataacactactgcatcaccgtttcatactgttgttcataatataactaccacatgcacatctccagatgatagtactattacagaagatacaccattaaacactgtaactgatacatatgaatctattaagcctatagatgacactattcataattcttcatctcaattattgtcaagatcgtcattaccaccactaaatatagagacatctattgggaataatgatactgcatcgttagaattattgtctgtacaacaacgacaacaacagcaaaatgtgtccaaagtttccaatactacacctcatagttcaacctttccaccttctagtcgtggtagtttagccccagtagattcaatgaactccaatattcctaatgttaatagcatcccagaattagatttaaatgatcaggaagacaatagtgaattaagtagaaaaagtataaaatctacttatttattgactccagtgaggaaatggatatctattagtattatctatttattttctatggtgatcgggtttgatttagggaaaacttggatccatcaatcaattatatcttctaagttccaacaattttacaacacttcacaattattaacatttcttgccttaggatattggttacaaaatcattttagattaaatttttctgttagaaataatatagctgttgtttctatatttgaaatgctaagtttttttaccttagattggacaccttgtttcccattattgttgttgtcgagattagtaacaggtatatcggttggattatttttaagagggactttaacattctttgagaatattggatcaattaggtatagaattccatcatgtatctgtgctggtaccttatgtgctatcttcttcaatacagttatgtgcaattggctattttatggtacaatttgtttaattatgatatcaagtattgttgttttaccaaatacaaagaatcaaattgaagtgacatcatatgtgattaatagacagaatttatttgtagtggtaggttatattgctattcaatttttattgatttttattgataattcttacaaatttattttagcattttcaataatcattccactatatgttcatattgacaataaaactagaaatggaaaaatgatgtcattattttcttctctgtcttcttcttcttcctctacttcttcattatcattaattgcgacttataatcaagacaaattagccatacttttaagaatatctgttttattgttagccacaatcgatttctattcattatctacatatttagatattttacaaagaaattatgatagagtttattgtttattgttgggtgttttatttggatctattttatcagagcatatatcatatagagcagccttcttcaccttgattctaactgtattgattactataactatgaagatcaatgacttaaatttattttctaaattactagtggttgtagttgtgggatgttttgtcattatgtgtgtgaacactaaaccattacgagcaagcattcccagtaattacacttttgagataataatcattatatcaggtctaataatagctgatgcattgacacatatataccctaagaaattaatttacaatagtttgatggagataaaatcaaagaaacatccatatgatgaaattatagaaattataaatcattcaaataaatcaattgaatggattcataataaggcacctatgtttgccctaacgattattaagtcttgttatgagaaatcatttatgatagtatggatcttgtcaggaatcctttcagccctcatatttcttttaactattattataaatcatctagaatagttctattgttgcatccttacaaaaagcaagaacaaaaaaggaagaataccgaaaatatatataactatataaaatcaatgtatagcaaataatgatagtaatcttgagtttgtttgtttgtttgtttgttgttgtttttcatttcatttctacaagagagagttacattttgtcgtgaagccacgtaaagtttctcttctacagtcgagtcctctgtctccttacgactattattatgcctcgcacttagtgatatcttgtataatgtttttcattcacgtatttacttctttttattttctccttgtcatttcatataatctctaaatgaataataaattccttcgtatctatttcttctcaaattgcatatcaaaacgatttgccaataagatcgcgaagttcgagaaacataggaaaacaaaacagagagactcgaactttctatgtcttctccttttcttttatctcctctattaccgaaaaaaataatacaataaaaagggtaatccattaaacgaaaaattggttttttctacttttaatttatgtttggctccattggaaatataaaaaccaaaggaaataactgctcgaacacgcaggaagatactacaaactggaaggacaagggaaagaaagagagagggagagaagagggggaggggtctgcgcatgttttttctcttggatacgagattagttgatgagttttaagttctacagagttagtatcggttgggttctttctctctgttcgccttagttgtgtccgaaaggtcttccttcttttctactcccccccctcctcccttccttctcctttttgtcacatcatgtttactctgacagtattggtgcatttttgcagatagatatatctacgtttgttcatatatatttctcttcttattgaagtctactctgtgtgtattcttgtgtgagctcttctgtgtctttgaacacctgtgtagcgttgtcgtgtattacatttttttagctattcattaatttaatacaacttctcgtgtatctagctactaaggaagaacggtgtggaaaagaaacatcctaccaataaattatataataaatatagacacatattttaatcgtcatccaatattaatagtgtaaaaatgttccgtttacaactttcaaaggcagtccaaaaaacaggttctagattgttactacaacaaagggcttattccaccggtggtcgtgttggtccaaacttttacgttactgaattaaagcaaagatttggtggtgttttcctatgggctggtactttgactttgttattaggttggccagctgctttttacatgtatcataagaaagttaatgctctacctgacttataagtagaagccttgacaattgagataatccgacaaaaaatagaaaaaaattaaaatactaaaataaaaagaaaaatagaacccttgaattttaaaatatctatatatacaagtatatgtaattaattattctgcttttgtttatttttatatacatattccaatactacttcttcttctctttaaatttgtttttgttctaatatacactttaattttatttgatatcattaattttttttttgctttcttttttcttttgacttctttatatattgattctttttatcattatcattacttattattattattagttcagtataaaacatgtatataaatgatacatttgataaaataatattaacattaaatatattacaaaaataaatcatataatttcttcttcttactgttattattactacttttttgttttcatttatgtttctattaactggaatttggacgagctttaggcccccaatttttagtaggattttcttggtacttaacgatctttaattttcttaatttttctatcttaccacttaattcattttcttcaaatgataatttcgatggatcaaacaatttagttctattactttcttttggcagccaattattcatatttcgtatgatctgataacctacgcctctttcattcattttagatatatctttatcaggttcacagtgtctcaaaacataccaaatcgcctcccatggtgcgtcagtcttcaaggatgatggttgtgcatgtgtcatggaacaatcgtatcctaatgatccaagacctgcagctacttttctcagtggtggaacttgtaattttaagatcgaagagacaacatttggactgaaataaaatggtgcatcagatatttcattcttggccaaggttaacatcccttcgattctttttcttgtaccatacgtatcatccatatctttatgttcctctttattgattctcaaaacctcttccacgaattctttgttatgcaatgggccagcatacattggtcctgcgaagtgatacgtaccaccgcagaacttacatttttgatccactggtgggccctgtgcaacactatatttaattatctgttttaactttttcttgccctcgcgttcagtctttctacctagtggttggttgtgataggatccacattgactacaatggtaagttatcattgtgtttgattgtaaatctttaaccaagataggactagtcttgaccttaacaaagacgcggacatagaaatcaatacttagggatagcaaaggttccacagtttttttatatttggcagcgctttgatttaatagatttaatactagtcttagggcagattcatgtgtagcttcgtgagacacaagattgaccccaccataaagagcaaaacatttttccgggtacccatttccagcaaggacagctaaatctgtacaagttaccaacattagaccatcttcatctatggtctgtaacgctgcatcaacaaaaggtgtaacagttccatagggatctaaatcaataacatgatacttaaccttttcggctttatttctgtacattaaaacattggcatcatccatattgcatttaactagatgactaactttattatattgaatatttctgtcaatagattccacggcagcaggtaatagatcattagctataatttctttaacatgagggatctcatgtgcatatctgatagcacgtagcccagtagcagataatgcttcaaggattcttatgtagttggaacctttaaaagtgtcaattggttcaccagtgtctaattttctacgttttctattctttttactcctagaattattagtgttaatcttttgtccgtacaaattatcccatgctttaatacaagtaacacttaaatccctattaaattgttggatcgggttataaaagacagtctcctttttggggaacagtatttgtgctttcccttctttaacaatattataatcatcgatattgagagtttcgttagaatcagaagaagacgagggaaaagatgtattgttattaccagagaacgttgttttcactttattaaatgcagcacgtaacattgtaaaatggggttttcctctgtaaaggatcattcgatttgggaaaagtgcataataaataatataagcgattgaaataaaatcacaattgtaatatttgacaaagatagatagaatatgcatatatatttacatatgttgtgagaaggcatcgatttttaatatttttgtttttttttctttttttttttcactgtattattttaaaatttttcaatctggctatgcaattaagaaaactgaatggtggacaacaaatgaaaaaaaaaaaataaaaaaaagaaaagatacttttcagatagcccaattccgataggaatattctgcggaatacaaaagccttaaggggttttgttcgaaaaaagaaatcaaaagggaaaaacgaaaggtattttagaaaaaaacaaaaaaaaaatacagtattgcaattgtaaaaaacaattccgaaaagacactagataaatcagaaatgtaaatatatacataaacatatatttataaatacacatatttatacacatttatgtatatttatatatgcgtgcatgtgtgtatatgtgtatttgtaaaaatatgtatgaaagaaggaagaggacaaaatataattgcatatcataacatagaatagcctctaatatatttttgcacattacacacaatatataatgccaccaaagggttggaaaaaggatgcacaaggtaattacccagttcaatcgttcattaaagaacaagaaaaattgacaatagatgatttattgttccctaaaagttctatactgaatttaattaaggaggtgcaaatggagaacaatccaaacagaaaattagtagtcactaaagctgcatcattagcattacaaagaagtgctactgtgtttgtaaatcatttgctggtatttgccagagagattgcgaaagaccagaatagaaagagttgcaatgtggacgatattctaatggcattagaccaaattggtcatcctggtttaaaaaacattgtaagttctaaaatggacgaataccaaaggattatgagtgaaagaaaacagctcaaattaaagcaaaaacaagaaaatgaacaaaatagtaataatagtgaaaacaatagtagtaatagtaatgaaaatatacatgaatcgcaagatataaatcatggaaacaataatgcagaggtagaggaagatagagatggtgtagataatgaaaatgaattgaataagaggcaaaagaaagatacaataaatggtactgagatcaggatatcaaacacctgaaaagtatttaatatattataagacatctggcatcattgatattggaaataaaataatcttgataatagatatgatttgcatttcaaataagaatactaagttctcttcaattgttatcagccacgttatatatctatattcatctctatatattatacatagagataaatatatattgtttgatttggttttgttaaatcaaattggttctattttaggatttactatacataatatctaagtactttatgttgtttttttctatctccatgaaataaatatatgtgttactattattagtagtagtattaaatgactttgtttcctcttgatttttcttgtttttctgtaaggcactaacaagtcggatcttgggtatgccttaaaatccgaatgtcatttattattatacagaaacaattacagaaacaatatttgtcttttgcttcttttgtctaaattttgttgcaaaatattaaaataacaaacaaagaaaaaagaaacacaatacacatattacactcataccttttgtaacattattctttttcaacaatagtattttcttttgaattgtcttctgacacatactgcattaagcacacaatgctaaacaaagcattattgtctcattactatttcatctttcttgccttaacaaaataaaaaattaggggaatgttcctgatattgttgttttatttttacttaatccaataatttcgcctctacataatctatggaattttattctggttaacagtgaaatcaaaagaagaagaagaaacgaaaaatacaaaaaaacaaaacaaaaaataacaaaggggtaccattacaccaacaatccttctctccccccccaggaacaggatgcttttaagaaaaataaataagaactgacaatttttaaacacacatcaaatttcccaccactaccacaactactgttactaacaacatcataaaacatatatttggaacctcatattatttatctaactactgctatagaagtcattgataaacttttttttcttttttttttttgaaccatctatatttaaattcattcttatattttttatttgtttgaaataaacgagtaacactcttcactaaatttggttacatataaatagatatataaaatatatattaggtattcataagaatatattatcatcaaaactaaaaataaaaaaatacctaaaattcatacattaatcatatcaataaatttaatttattggttcttttgtttgtttgtttgttttgttttgtgtaagcgagtacaggtaccaagacagcctatatatatatatatatatatatatatatatatatatattgttttattgcttttattttcaatatattacattattattattatgaacccattagaatatgcaaatgttccaacagaagaggccttcaagaaaaagactcaactgtctaaaaaaaattcaacaattaaagaacgaattcccagaataattccacaaccatccaataatcaaattattcaaaatgcgaatgacgctctcaaaaataatttgaaatatttggatagagatctagaggaacggcactatcattatcatgctcgttcgtccaatgaagaaactaatgataatagaacagacttaactattaatcaactgttattaaaagacttctcaaacgatactgaagacatatcaaagatcaattttgaaaaaacttgtaggtcaagaaactacccttataataaaagtgctgatttaactactatacccactatcaacactaatgataggacaaataatagagatgaaattcctaaggtagagaatattaaaaaaattacaagagatgtgtctccactatacaatgaacgggctcgtcataatcgccgtcaagaagaacaaatattaccaaacaaaaataaacatttttataggacttcattgggtgattgggttttccaggagactgttggagctggatccatgggtaaagttaaattagcaaaacatagttatacagctgaattgtgtgcaattaaagtagttaaccgagctactaagatattcttaaataaacaacaaagtttacctaaccccaggaacaaggttgagattcaagatagagagaaaagattagaaaaagaaatttcaagagataaaagaacaataagagaagcctctttagggctgatattatatcatccaaatatttgtaaactatatgaaatgtgcaccttgtcaaaccatttttatatggtatttgaatatgtttctggtggacagcttttggattatattatccaacatggttctttaaaagaaaatatggctaaaaagattgcacgtagcatagcaggagcattggaatatttacatgcaaataacatagtacatagagatttaaagatagaaaatgttatgatctcaaaagatggcgcaatcaaattaattgattttggattatcaaatctttacaataagtctaatcatttaaatactttctgtggttctctttattttgcagctcctgaattattacgtgctcaaccttatattggaccagagatcgatatttggtccttcggtgtcataatttatgttcttgtgtgcggaaaagtcccatttgacgacgaaaattcaagtgtcttacatgacaaaattaaaagaggtagagttaattatccctcctttctatctatcgaagttatatctctattaacaagaatgcttgtagttaatcctttaaatagagcaactttaaaagaggtggttaaccatcattggatgcttcatggatatcatggaactttagtagaatcgcatctaaaatggagatctccattgactccatcaaatatcgataataaagtactaaatgaaatgtatcatttggaatttatcgataatattatagagacaaagaagaaaattatcagcataattaaagatgataaatatattaatctttcaattgaacatgaaaaactacattcatttgcatttttaaattcaaagtccccaaaaatcaacttagcatttgatgatccactaatagcgtatcatccattattgtcaatctaccatcttattttggaatggttgcaaagaaatggtaatatatctaataaagatataacaatcaataatcgaatgcatgattttacaaatatcgatgatgaaaatattgaaactaaatctgagcccttgttaaaacaaactacccaaaatatcgagaataaggctaataaatatcaaaaagataagtcagataattcagatgaccacacaacaactgtacctttaaagtcaaatcctggtgaaaataacaataataaaataactacagtgactatgaaaaacactcgagaattagatcgtccaaaacatattttaataccaccaaagttgactgctaaggctaaaggatatatatcatcaaccaaaaaaaatcatttcgacccatcagataatgccattccgacagaagactctactttgaacaagaatgacttaattagcaagcataaagatactataaaagaaacacccactttaaataatcaggagagaggaaaaataaatactatcttaaggagattatctctcaaagttactcctaacagcaaagaagaatggtcaaatatacccacttctcaaagcaatattaatcaacaaaaacataatatgttaaaccattttacctatctgaaaaagaatttagaatcacagaacaaacatcagagaacaatgtctgaaaatgatgataccaccacaaagattattcattttttaaataacaacgacaataatcatctgcttagcagaaaggaaggtgttttaagtgaggataaagaatatccgaataacaatcattatacaacattagaacaatcaatgacagatagtaaaagatttctcccaacctttgattcccaaacagattttgatattacctatgcaattaacaaaaatagaaatagaactttgtcagtaggtcatccacgtcaaaatatgttaaatttcttgagacctgatgttacaaataatgaaaatgttattcccaacaaagtttctcatgacccaatcaaaagtaacactgttaagaaatggaaaaatcatcccaataatgaaatgtttagccaagaacaaggagaattacatggacatcctttagtactttgcaataatcagaatatgcttgctaaagatcttagtgagtctgagattattgaaaatgcaaggaaagcatcattaggaagtatgccgtcgatagattacccacgctcattattcctaagaggatttttttctgtccaaacaacttcctctaagcctttacctgtagtaagatataaaatcattaaggttttacaagaaacgggtattgaattccaagaggttaaaggtggattttcctgtatttatatgttattttctaattcaaccaaggacgatggttcaatagacacaattaatcataaaaaagacttactagatagacattatgaaatccaccaaaaaggttcctataaagataatagttcagcagtaagtaatgaatttgttgcagctcttaatgttaatcctgagaatacaaatatcaactctacaataatgcctcatgatacgcattcaaaggaatcctttagttcttctagtttacctgttagatcctacaatggttcccatgaattacctgataattcatctacagttaagaattatgaaactaatggttcatcatctgtaacgtttgaaaatagttctaatctattacatcttataccatctagagaaaacaatgatgttataagaatagccaaaagagagaaagtaaaatttgaaatacatattgttaaagtaaaaattataaacatcgctggtattcattttaaaaaagtcagcggtaatacatgggtttataaggatgttgctagtaaaattcttagaaagttgcaattataattctgaacactgccaaaaatattgctatttattttgttttgcattcaacttggaaaattaataagaaatgaaatcaaaacaataaaaatttattagtatgcgcttcagcctacctaaaattaaaacaatagtattacaataatttatattatcaaaatacaccattaggtgctggtttacattgaaaatcatattttaatatataactttataatttttgcatgataaagagtaaatatcattatgttttcaacagatctaatcgtattgctaactctttttctaaatattgataaaatcaagtaatattattgacgctagtagttcaataaagaccgcccattatcatctttactattatgttatctaaaatattaaagttaatctatctaaaataataaagtctgatatattatgcatttaccaaacacatatagtatatatttgattttatattattattattattattattattattattattattattattattattattattattattattattattattattattattattattattattattattattattattattattattattattattattattattcaatatttttattttatgtatttaaaaagcaacttgaaaatagttatctacttttagctatccatgcctattcaatctttctagttcttgctgtaacgcaagcaaccatatatctctgtgatttctagattttgccataaatgtcataatcttaaattgaaattgcattttaatatgatttttattcattatgctgtagcatatatcaagatcttctttattatcattgtatccaacatctttgtgatttctaatgtacttattcttagtagaattcttccttccaaagtagattgaaaaacaacgactgttactctcctcttcagaattccatccatcttcaaatagctttggggtcgtatgatatcctggattagctgaatcaaacgtaaaatcatcgttgattaaatccgaagagcaagcagttccagaataagcataacaattttcaatagaaatcgtttggtagtgttcgtattggtataacagatttcttttggatgaatatgtaagagaaaataacattataaacccaggaattaaaatcacaaaatatttatggaaggaagaatgttttctgactttttggaataatatccctttctggattattggtcgtaacaatgatatatcatttatatcaaatttttttttatttaaagtatgttcagttaataaagaagatgttgcacatttatgcatttctatagagtttgtctgttttgaatcttgagtttgcaattcccttaatttctgtgaattaataaaattttcataattccaatatttcatcatattattcaatgacacaatccaaatttttgttacttgcaatgtgggtcccattaaataaataattttatggtttttcattattatctttagtaaacaatgttttaaacagaaagcattactttcctttttccaaaatgtgtggtacgcagctgctaaagtctttaaagtggttggatcgacatcagtagcatacgttacattttcaatatcgttcatgttgattattccatcagattttaatattcttaataatttagtattatagcatttgaatgcaaaataatcattattcttgaactgctcattcttgaaggaaggagtaagccacttaaataatccatttctatctaaatcatagggcatctccttgtaaactaatggaattttgtctagttttcctctttgtgaggcaatatttagtatagaacccattttatcagttttgatatccctgggtagtaatggtgaacatttatatgaacttgtacaaaaaagtaaattgtcagaagtgaagatgtaataaagcttaaatttttcctttttgaacatattgaaataaatgtccttatcacaattaatttttaataaaaaaccttctataggagtcggttcgtcggttatgttcactttccctccttcataataacataggctatgactccaatttctatattctagttgatgactgttaaacaaggcaaagtaattttttaaaaatgctgaatcattgctagggtacaattcaattctattattaatcttcagattacatcctgcattactatataaattgcttaaattttgaaattgctttattttagtttgaatagttagtttcctcaaaataataatataaaaatatcttactaatgcacatggaaacacgtagaggcctccttccaaaaatgccaatttaactatatttctttcctgtttttctatcatttctagaaatctaaatataactaaatttatttttatatttaacgctaatttaatctctggtattttcacggtaatagttctagtcatacttagttttttgaaatattggttcaaagtattgaaccactgaaaggaagtgcttaccagtttacattgaagaataaatatttcaatatgttttattaaactttttcctcctgtatgactatgaataaacatagcattctgaataacaacagtcttatcaagtaaactataaaagcttataattgatgaggagtttaaggatattatcaaaataggtttacaagattgtggtatatcaccagcgaatttgtaattttcttttttgtaacattttataattaaagggtaacctacatcactcgtttcagtcaatatagcaaaatactcgcaccaacgttcctcaattcttgtatcaatattttcattctcattgaaggttttattaggtgatttgttcattaatccaattttttgcataatcaataagtcactcgacaataatttgtgacatggatatttttgaggtgtgatatacttcttattattaaagattaattgattaacaccattattattgctcatagtaatagtatgtttattttcaattgattttaaattatttatttcaggtaatgaattatttaacttcaaaaattcttctaaattttcttcccctattggctttagtagtttcaataatttatacttattttcaatattatttttgataaaatgatttaacttattaatatttgaatattttgatcgccttttattataagactgcttatatctcctttttcttttccttatctctgaatacttaatgtccagccaatttatcatataattatccttaaagtgatctttgagatcgttggacttttcgtttaatgctctagtggacaatttttctgaattagaacgttttatattccctgaagttttgtttaatcttgaataagcagctatagatgtcgctgtagagtgtcttctaaacaattttttactacaagatactgtaaagccccaaccttgtggatctttcttttcagtagaataggatgaaatatgttgattaaaatcaaaattaactaattcgtttctattcactacatttttcaaaagttttattttaggtattttatctttctttctagcattaaatttggagtttccttttattattgcatatatatttttattatatattcttttatgaccatgcaaagttaacttgttcattctttcttttactttctttgtataacagcgagtaaaaaatttccaaaaatggctttgttgttcttggtaccaatactttggaatacctcctaacagtaatgtttttgaagcttgtgatatttcccaaggtgttgcatatgttaaacgaaatccagtaaaagatttacgtggtatagtttttatttcatatttgacgagattctttggggtgcaaatatattgaaggaagtgttcatcactggaaataagtttaaagatatcattatttttgcacatagtctgagttcagtaggtgttttagttattaacacatttgaaatatttcaaaggatgaccaattaatacttttacataaaataaggtttttgttttgatatagtttttcataattttgtgacacattaatttttcattaaataataaaaaatgaattttctttttcatttttttatcctataaaataaaaccataagtaatagtaaatttttattcaactaataattattgaagacttttgcataaagttattatcattcggtgtaaagataaaattatgtttgtagaccattcccaccttacaaaaatgaaagaacttagacatgatttgttttacaattagtagtattcatcataattaaatctatccaaaactagtggagcgataatagtccaattataaagaccataacaaatccatgcactgactattttcacccaagagtaaaaataagttctaccgactggaataaaatcccctaagtcatctttcccaatatttattgttaatagcatggcaatccactgtgtagcaagaaaaaaaataacatggaataaagtataattatatttagaacctgcatattcctcatcgtttgtggtattttcaccttcattatgtaatgcaggtgtggaattgtgattgtttgattgaatcatccacattgaatcatataatgcactttctggaagtgatccttcatctacggcctgcttgatagcttcgaaacgaagttgatttcttgtttgaccggataatccttcgtattcaatttcgtcattgtcactcaaaaatatttgaccattttggttgctaccttgaagggcacgattagcagctgctcttgttgtggtataagcaattgcaataaatgtgaaaatggaaccaacgataatactaaggtttctagtcccactatttcttactaatggattacacatcttatcatctggttcagatgccatagcactcaatgttaaataagtacaatacatagaaaccatactactttgagctaagcctacaccaggattagccgcttgtattttggggttaatagatagtacagtacttaatatagaaagaattatattagttgtaattgctgttttattcatatggcactgatcaccagcaaagagaataaacattactactgtcattgcaaatgataccgtaaacattgcagcagtacttaatactaaaaatttttgccacaataaagaattatcatcttctaattctacgtgataaatacaggtttccacccattcatgagcaaaatctaccattaatattaatccaataagtataaaaagagacccactcggtactgaaatccattttgaaaagaaaacataaaaattattgggtaacacaaaagcgaaaacgaccaataatagatatactataaattttagggaccaccatgaattttgcaatgaagctctacgatctctagttgatttaactcctattaataaaatagccatgatgacgtggaatatacctaatgcaaaatttagtctatgtacagtgaagaaaccacattcaccagtagatgtacatgttttacctggccataggtatgacttattagcagacatagaaatccaggaaatgactgagttaaacaataaggcaattgtatacagtaatcgtgtacccaacgaggaagaacccacaacattaaataatttggatagcatatttgagcaacatcccccaagacatgaagccaaaaatgaaccacccatggtaattggaagtgatattatagaacccatctttttttttatgtctttctatcttttgtagatttaattttatttaatttttacccctttatatatatatatatatatatatatatatatatatatgttttaacttgcacgtttatcttttttgtatctatctttaactctctttgagtatttccaataattgtatttgattttgtaattattttattttaatatgatgacagtttatataaatttctttcttatcaaacaccatatagagaaaaaagtatattaaggtataatgtacaagcttattttacagattcacttttaattttttacttttttttattttctccttctttgaatgtataaataaaatgaaaaaaaagctaaaaatgaataattaagatatgatatgatggagaagctgtgggaaaggtgaggctggtgcagtatactatctgattaggaacatgtagcagttaggttttaaggtgtttcctgataagaggtctacatgtagcactctgctgtaaacattagggatagagaagattttataaagaaacaaaagcaagaaagaaacaaaaaaaaaggagaaacaaaaaataaaactatgtcttttgatttgttaataatatgcacacatcaaaatattgtcgaatttggttctttgcatagttcaactcctgatgtaaccattacattagatattaatgaaaccacctatattgatcaattaaaacatgccatatacgattacttgaaaaaagtgaaaatgagtaacatggataacattagtggtaatgatgtcttaaatttgggtgttttatatactgaaggcattatgttctcgttgagtgaaagaaaagaaatttatagattgattatatcctattttaagttcagatttatagaatttatacctaatcccttgttatattgttttggtaataaaatctcaaatgctattattattgatatagaatatgatatgattattggaacccctatctatgaatatattttgcttgatgaatatatatctgtctcaactaggtccatacaagatatagcaggtaggaatcaaaaagctgtatgtacaatattatttggcgatgataacaacaatactaataatgacaacaataagtcatcatatcacaattgtaattatgagtcaaatgatcagtccatatgcatgatagttgctaaacttcaaagagttttaccaattgatattcgtaaaactttgacgcagaatgttgtgctcaacggttactataagacactgttattagactattctcagcatatagacatttcttttaatgttaattcaaagttagacaagtctctttggtcttgttcattgatatatggaatgcatctaatggaaaacaaatgtttatccaatgactttcaaccactgggcagttactcaaccaatagaaatttagaggctcttgattggtatcaaacaaattatatttctaaataaaaatcttaactacacacatctttcaaatttgcccaaaatgatccaaaatcgtatatatttggtatatctttaggagactccacttttgtaaaatctgataaggtatatatggtatggtcatatggattagtactataatatttagtttctgaagaaccaagacactgtgtatctaagtctggatccaatataaaccatgtggaatcctcttgtggtgccccagttctaactaatcgtccattcctcatgaattcttgtatagtgaaccatttatctttttcgtttgtggtcataccatctttgataagtgaaagttgcatgtaggtgaaactgatacaaatcacagagaatgttccagacaagataaatagagtaagaaccggcttgtttgatatcaatgctttagatctgagtaaaacgtataatagtcttaaaaatgcgtatgtagtaacagagatgtttccaaatagaaatccatagaaatataaatagtttccctttccaatacaattattcatccatatgcaatgatgatcattgagtaaaatacatttattacaaatacggcagtgttttgatctagcaggtttttcaagtttgcaggtatgacaaattgtttttggataaaacaaaatattatcaaatgggtacttgccatttaatttagattgataattatgggattgtgtgttctgcggttcaattaacatagtctttagaccagtgaacaatgttaaaaatactaacacaggtaatataaatagattttctaagttatttgaatagttataaattaatggtagtacattgaaataataaagatcaatcatatagaggcataataataggtacaaaagtgggaccaagtaatatttccatttgtattttgaagaatctttaaaaagaggtctatatattctcatatagtaccattggaagactctcaaatttcttaagcttggtgataacaacaaaagaatgacttggcaaagtgttgttaccaatactaaattataaaacatcttgagcttagctacgtggtatccgactagcactagctgaaaagaaaatgacgaatacttttctagactgccagatatcttttatagatacagataaacatacagcacacacacacgcacacacacgtgtatacacaaatctatattcaattatattaaattttgaatggtataagcgtgataattttcgatctaccggctgaagtttctttcacttgtgaagacttcaaggtttgaagtccactgtttgttgtcttagaaattttgtaaagaaagagaagaccttttcttgctcttccacgaccgctaccagattgtctgaaaaatataaaaaaagaaacttcacatgtcccaaagaggcaacaatgttttcgaaactatagcaacaacacaggatttttatatagtaaaaaatctgtcaagacaatattctattgaattggacagctcattaatcacttattttatactggaaccttttagtgcctgtaaaactatattgaactttgttaacaactgctggtttatttgattttgaagtttgcttcagttgcaattctataattataataataataatatcattggtgtaattaataactatgatgaaacatgtattaatatacttattttaccaattcttggtaatgtttcattgtttctatgttattattattaatttcttttttttcagaaatatactacaattatcaagaaaactgcaaagatatttacgtagcatatttacttgtacgtggatcatcacaaatctgaagaaatcttcgttatgattatcactactattctccatttaaaattgtatagctcaataatacatatattcactactttaaatgttatcaagcaacaaatacaaattatgcagtggattgttcattatatatatatcttgttagagttgcttctaagagaaaaacaaaacctttctccctttgtcccccttgcccttacacaactttctatcctcttctttggaacaataatgttgctgttataattaagacatgttgtataaccacccatctacatctgtgcacacatgtgtcatagtggtgtcagagggattactgtgtgaggagtatctttgttttctttagtaaagtagaagagtgataatggttcgttttggtgtgtctttctttagtgttttgtagattttgtagatctcggaaattttttgaaaatttggaaatttggaaaaaacgagatgagcgaagaaatagagaagaagacaaaggtgcatgtgaaaataaaattagaagtcggtagacaaagctgattaaaacataaatggttgcaatggatataagctttaattattacttgcaccaccctactactagtacttgattcaaattgtcctaatatagacaaataatgcatgaagaataactatcttttcataactggagaagaaatttgtttaaactagattgcaaatggtaatattgtttcataaaatatctgttctaaaaggggaaataaaataaaaagtattgacagatataacagtaagaatctaaaaaaaagaacaacaagtgagcatataaataaatagataggtaaataagaagaaaatatatttgaattaacaatggatccattggatttattcaatctcgatgcagacatagattttgaaactgcttatcgcatgttaagtgattttgattcttttaataatcaaattacgactacaactaacagtaacacccataataccccattggaccatcattcaggatacactcaacaaccacagcaacatgttgttgtaaatcatctcaaaaatgttcttccgactaatcacagtaatatatcaatatcacataataaaatggcaccagctatctcaatattagaaaaaccgacacattcatccctatctccttctccaatgtgtctctttaacaataaaacagaagaatatttgcatttaaatgaaaaaaatctatgcaataatatatattctttgccaactgaatctaatcactcttctcaaacgccaaaaagatacaacacacaattacatgatctttctcatttaacaacatttaatcaatcgaattctacaattcaaagaaatcaaacttttatcaaaattgcatctcataataataataataataataataataataataataataataataataataataataataataataataataataataataataataataatataatttcatcaaatctaccgccaaaaagcacatcaccctataattttaaatcaacagctgatccacaaatttcagttcttaaccatcaagatatcttattacataatcatttatctagtcaaggtgttggtgatgaattactgagtgcatatgaagctaatgccatagaacagtttttagataacttactatcgttagatagtaatcaaactataccgtcaaatgtctcagcctcatcttcagatataaagcataaatatgataattctaataataattatattaaagatgagttaatggaaaaacatttaacctcccataatcttacacaaaaaaatacggctagtttaataaagactacggttgaaataacagaatcaaatgatagcagagatacaataaaagatgcaattactagtgaatctgaagatattattacatctagcatgtttaatgaagatattgataatgagtatatccctcaaccaattaatatccctgaaattacactagatttattggattgtccagaacatcttatctctaagacaaattctttggaattcaaaaaatggaaacatgtagaagtggaaaagctaagaagaaatcaaacaaagaaagcttttgatcagttagtttcattacagaataaatattcaaagccgcttagtaataagtctaaacgtgttgcaaaatatcagttattaacccaagtcaagcatgatatccaaaatttaatcaaagcaaatagatttttagaagaaataattactagagattcagagagaatggcataaagtgtgttaaataatttcaaaacttttaaaaccttttcagggtttgataatattcaaatatttttagcaatactataatatgtaagtcatacaaaataaataacttttaatttggattgtttattgttgtacacataaatataattattcttctttttccttattatttattatttatatgcagattaacaggacacaaaaagcatacttacaatattactttaaattcttctcttttctttcattgaatctctattttatccgcttcatgtttatgaccacataaaaattaaattagtatatgatacatacaggtactacttcaaatatactactatatatactcataaaatcccttatctttcttagtaccttcagtcttttccgtattatgattttgaatatctttaatggttttatcaatttgatttaatataatattgtatgagtctgttgtattggataatgaaatttcctttgatatatttggtcctctattaaaagattccctagttttttcggttaaattattagacactcctaaacttacagaattattaatacagttgttgactgaatgtgcagacttacaaaaaaatgtatttggattagtaacaacaggaggagatatatgtagagtcataatagatttattatcactgtcttcagttttttcaaaaaatatagagccattattgaatgaatatctttcagaaaacatggaatctattccataattatcgtcactttcaaaagttatattgtagctataacagatagtttccaaaacacaatcccatgtatttacttcgaacaattcttcaattttagaactatagtcaacatttagatatcctactttaatttttaattcattaggagtatgccttcctattttgttaaaacaggaataatttttcattaaacaagaggattcttctttcatggcactatttgaaataacaacaacaccaatatttgagttcagcgtagagggatataattcttttcttaatgataagaggtcgaattttttcattgaacaaacatctactaattctttaaaatgtccaacgtttatatgttcatttatactaaaaaatgattttaatatataaccattatgattcactatacagagttttgattgtggtaaggccaaatttaatgcttttaaagtgttcacgatcgtatagtagtcattgttgtcattcaatttattaaaatcaacttgcaaaacaataaacaattcatccggtttctctcttttaaaagaaattatagagctaatggatgttttcatagaaagaagggtatcagctgcattgttcttttggttatttttttctattaaaatacttcttcttaagaagatattctctgaagacctttttaaactgcttaattccattattttttgggggtttattaaactggtaaaagttttgctgttatcatcatctgtagttttactttttaatattaatggtaattttagtgttgaagttatgtttttttcattaaatatcatctcattatctaataaaccagaaatccatttttgtaatacattactgaaattattaatcagagattgtttcaaatatgctttcttctcagaaaataatgacgtattgttatgttcagaaaccaataaggtagaagaatctattgtctgaacatttatatctttaagattatcaaacttcataaggttccttagcttagtttccgaaataatattatcagaagatatatatgagggttcatcaacaaatgcgattacaaaagctcgagaaaagagaaagcaccaagatgtaatataatcggaattgtcataggagactagtaacttgtcaactattcttaataagccaaactcttcatctaattgccaatctgataaattatctctaaagttttctaaaagaagttgtgtaaaaaatgatcttattatgggtaattgatctttggttaaattcaacgaagtattgtgatttgtagcaacatcagataccgcatcagtatttgaatgagtaattctcttatcgaaacatggaagaacaaaagattcatttcttgactctcttatttggtcttctttactgttttctaatgtagcaaactgtaaattatatatattgttatttgtattaaaacttcctaatgaaaattttttcattggaggatcagatagagaaatattatatatttcttgattactagactgtgaaatagaagtgggactttgttggaaaatgaattggctttgtactttattaactggagtggtgagtgtagaaaacccagtttgtgtaggagtatcgcttgactggaaagtaataggagatgacgagctggtatttattaaaatattagatagtaatctgtcctttaaatcttcatttttagggatgcactttcggacttgtcctttttcttcaaagcatttattacattgtggaaataagctatgaaaatccagagatgttgtggtagacaaattatctatagaaatagataaacactcttcatgacacagatgtttacattccaattccattattcgttctccgatgctcttattggatatcgattcattacaaagtgtacatttttctttgataaaagatctcttgtttctatttggaattgatcttgaaattggaggatttctaggtgtagatggcttagacaaatcacactttgatgagagttcaacaataaaatttgaagaaaaagaagattttaaaggtgaataatttttagatacagagttttctctcaaattacctttaacaacagatatctttgattgggacaaattttcacttaatggagatgttttttttaagttttcattcgagaatgttatttttttcatattttctattttatttatatcgtttaaagattttgttgaaaaggacctttgaaattgtagattaggtgttgtttctaatggcgtcgatatatttatattttttttctctcttttttcattgattttttggaattttgcaaatttcgtagtccatttactagtccttgaggaagatagattacttattatgttatgaggactatatttatgtgattgtgtagtactggtattcatcaatttattagttattaattcctcaggtgtcttcaccatataaaataattattttcagtatagaataatataattaattttaagaggatatttaatagtagtaattcaaaagaagtaaagttactgaataaagtaagggtactttcttttttgaaggtttttcacttgcatcttttattctgttttaagttcaataaagggttttttgtttctatttagatacttaaaataattcattttaccatcactatctgtcaatgtcgatgatatggttggaagatggcagttgacaatttattacagaaacatattgaggttcaatatatttcaattattttccaaaacaggaaatacttgtaatactgacatctcattcttttaaatagaattttgttagtgcccttcattagctaattctgaaaaaattcaggagtaaaacagccaaaaaagcaaacaaaaatattatcgtttgcttgaaattaccatatagctttatctgatatatttgaaaaaggtgtcaaaacgtctagctaatgaatatacatgatatatttttcattactaaagaaggctgattataaggaagatattttttcttttgataagttttgacattacagtttacctaggtgtctgttgaaaaaaaatgattagataggtggtaaatgatgccacagtaatggaagcttatttagctgtactagagtttacattatcttaggttttactccagtcagagtagttattttggacattatcagctttattgtcttgcatcattcattaatttattatactcttgttttatactgtgaatataggtattatttagtcgttaaaaatgataaaataattctttttttttttaattttattcattttttttattagtattattgagaaacttcaaaaaaatttgcgatgagatgaggttaaagtttcgaagttagctaaaggtttgattatattataataagatatattaaaaaggtattaattcctgttgcaagatctagtttaacttataaatcttagaaagttctgaattattaaaaattttctatttaattgagtagtattaacaaataacaagatagatatagagataaataaacttaagtcagaataaaatatggaattagctgtgtctcatgaagattctcaaatccttttaaaagataaaaatgtattgcaagaatctgttatagataaatatagaactgctggtcaaatatcacaaacagctttaagatacttaatcaatttgattaacaacatatatcattacaagtctatccaacgtcaattgactatatctgaattatgtttgttaacagattcctttattttgacccgtctagagcagtattacaaaaataaagttaatgaaagaggtattgctattccaactaccatttccgtagatcaagttgcttcaggttggtgcccagagattgatgatgacgaaaacattaaaaagtctaataaagaacaattttctaatgaaacttctccatttaactctactgttactggggtcttgaaacctggtgacttagttaaaattacacttggtgttcatatagatggttacacatctgaaatatctcatacaatggtaatttatccagttgatgcatctgatatgaataatgtaaaacctactggtccattattaggtggaaaagctgatgctattgctgctgcacatattgcaatggaaacagtaactgctttactggcttgtgcattgacttcagaaaaattacctccttcattaggtagtaatgtcactggttctacaattagaaatgttgttgatacaattgcatcttcttataattgtggtattgttccaggttctagagttcgtagaatcagaagatttttagctggtcaaaatgaaggtattatagcagaaagagaatacaagggtgttatttggacagaatctcatgaggaagccaaattattggctaatacagaggtcaaggatatatcagttattactagtaacacgccacgtgttgcttctgcagttcctactgataattttactgttgtgaaaggcgaagtttatttgattgatttgaaatttgcacccttagaaaacctttctaagagagggttgattactttgaatacagttgattctttcactggtaagtctcatgatattaatcaattagtagctagatctggatcttatatcagagattattcccaaagttatcagctgaaattaaagacatctagacaattgttgactaagattgataggcaaggtgtttatccatttaagttgtctcatttgtccgacaatttcccaattgatttaaattctggtaatgtggacgaagagcttgacttaattaagaaagatttgagatcgcttagactgggtatgagcgaaatttctaacaattacttatgtgtggagactccgatacagatagctaagtgggttccgtgggaccatatcttaaaatctaataatccaaatggtgttctaagttatgatgctacagcggctttgaccttgcctggtcatgaagttccattaccaaagttaggtatctcttcattgaagttgaaacaattaattaaatcaagtaaagaaacattggagttacctgttgtacgtgaatgtaatgctgtagttttgtgtgattcggatatcagtagtactggcaaaccagaattgttaagattgactggtggtagtaagacatgttctccaagttggatacattccaaatatgaattaaacagtactgatccaacaatccaaggtatatttgatttaatgtccttgacgaaagacaagagatttggtatttctattagggaaacccagccaatgaaagaaataagtaataagaataagaataagaatactgctaattctgatgaaatggagatgtaatgcaaaggctgagagaaaagacaaaaaaacaatgaaaaaattcggagggccatattaggcacaatagaaatagttcaagaatatacatacacgcatatatatgtatatgtatatgtatatatgtatatatacatgtcaactctattgtaatatagtgaaataagatttatctgaagaagaaaaagttatattttcctatttgtttgtatattcttgtgaatagctttacttttacatatatatatatatatatatatatacatgaataataatttaagttacacaacctcgtcatcgtcatcatcgtcaaattcgtcatcaccaaccataattacattgttagagattttaaagttatcaggttcttcaataaatgaagtgaaatggcagaaaatgtaccctagcccagtgaaaaacaatataaaattggtaatgaatttgaaagtagtaatgttatgccctaataaagagactaagagaaagtgtagcatacctctgcctaagaaactaaaataaaacgacgcatacttatataattgtgatgggatcttaaattccaagtagataacatacgtggataagacaatagcaaataatccttgaataaaaacattaaactcaacaaaaattcgacgtatctgcgatacaccacctaatacagcaagagtaccaacaaatatatttatatatttaaaaattgcaggagttataggcgtcatcgtttagtatgaaattgaattgaagtatatggagtaatgcctttttttttgtttctcttttttttttttttaaatgctttccttttctttaatgaaaaatattgctggagatatttaaatgggacaattggtcatgagtgtaagaatcttcaagacctctaacaaatgtgtttgacatacagactgccaccctttataagtagattgagactaattgaatgacacagacaatatatttgaaacatgtcaaagacagatcaagagaatatgtgtatatgtaaaacgcggaggggagggggaggagggaaaaagacagggacaaaaaatgaaaaatgaaaagaaaaggataagacacaaggaacaaaataactaggagagtgtatgggtgcaggcgttgcttttcagaaaaacaagcaaaagggccagacgtctcgtttctttttcttctctttttttctcttctttttgttttttttcttttttttaccgtttggcaaatccccaaatttcaggggaaatgaaagtaattgacttttttttttttgtgtgaaccgttttcttaattcacaaagagctctcaggcagttcaatgtagtaattcctttaataacgaagtagattgggagggggggtaggtgtagagtagagtgcaactgacataaatattacataccattagattcagatggatagtatattgcatactatacaaaatattttgaaaaagagaaaatgtaaaatatatttataaaagatactatgattataactattgtaataaaatatgtatatatagtaaattcgtattaaaaatgatagataaaagatattcaatacaaaaaatatctaaagtaataaaataaaataaagtgaaatatatatatatatatatataaataaaaaaaacacaggaaatatataaaaaaatattatactagatatatctgtaagaattcttttatatatatagatagtaattctgatacatcatattatcatttaatttattttggtggcacatcatcatcatcattttgttctggggctggaggttgagcttgtgacatttcatcgttaccttcagacatgtcagaagtccataaggttaagttatctcttaataattgcataattaaagtgctatccttgtaagattcttcggataaggtgtctagttcagcaatggcatcatcgaatgcttgcttggccaaatggcaagccttatccggagagttttcgatttcatagtagaaaacagagaaattaagagctaaacccaatctaattggatgggttggaggaagttcagtggtggcgatatcagaggcagttttataagcattcaaagaggattcagtggctttgtctttgatttcaccgacagagaattcggctaagtaacggtggtagtcacctttcatcttgtagtagaaaacctttgattcaccagtggaggcagatggaatcaagtaggtgtctaaaacagacaaaatatcatcagaaatcttagttaattcttcttcgatcttaagacgatagtttttgatcaactcaacttgatgttcagccttttctttagtttcttctttttgttcgatagaagaaacaattctccaagaagcacgtctggcaccgataacgtttttataagcaacagataataagtttctttcttcaacagtcaattcttgaccagaagaagcaacaactttcatgctttctaccatttcctcataacgttcggcttgttcagctaacttggctaagtaaacagaatcttcacgactttgagacattttttttttgtttctatttcagttaatttcttacttggttgtgtacttgagttttaaaaggaaataatacttttcttcaaaaaaaaaagaaaaataagtaaataaataaacaaacaaataaaatcttttttttttttgttccttatagtcacttcctaaaatctgatttttattaattataataaataatttaatagatattaataaaagtaggaaatgaagtctctatgaaataaagatttctaatacctttagaatatcctttaataaagatcttttattttttatttatttactttaaaataaacttctagggattggttatcaaaagttccttttagtttgtttgtttctttcttttctttatttatttttaaattttttttttttctggttaattttttttttttttttttggatattttttttctttttataaacaaattttttgttgttgctatttttctttctgtttctttgtttgtgtgtgattttattcttttttttgtttttatttatttttgtttttcctatttcacttttgtgtgagaaaatgagagagagttaggatttttaaaggagaagagggaaatggagttttaggaaaactgaatactgaaaacagaaaacatataacacacagaattatttacaactgcgtatgtacatatgtgtgtatatgttttatggcttcgaagaaagataaaaggtacaggagaataaagacgggtagtagtatataattgtttgtattttttttgtgcaaattacaggaggttgttctaattgacaaaaagcaaacgataaaacaccaaaggtaaaataagattaatgtgggattattagatataagtaaagggtctgaagaatgaatggttgtggaaaatggtgtaaaaaaaatgactaagagaaagctagaaaaattagatgatttacatgttgtccacttttttttcacttagaacttcgtctgcttttatatttaaggaaagaaaaatacagaatatataaatgaattaaccaatattaagtgtcagaacgtatttgtacttattgtatataaacacttctattattttacaatcaaggataggtatgtgaaaatcatgacgactggtatatgtttacatttaaaattcgatacggggatagcaaaaatattctatgtctgagtgtatatgcactttccttttgtcataaattatacaatcatgttatgcaaaagttgttgagcattgacctcttgaggctcattagaaacagatgtaattgactttttcaagagcactctttttcttttcgttgtttcaattttttcatgaaatatctaactattctcatttcaatttgacataatttcttaaaatatgaagaaaattattctgcagcaatatttctttacgttctacattactttattaaatttatcgtactataaaaaaaaaaaaaaaagagagagagatacaaataagatataaatctttaatatatatatatatatatgtttttagttacagttcttgttgattctttactcatttgttaagcgaaagaaatattctaatgatctgctagaaacgatttgtagtaaagtaaagcaatgagtaagcatattgttcactttcttaatatttcaaatctctgaaactcaaatttgggcgtaaaataataaatgtttttgatgtactataatatattttcacactacataatatataagaaaactaaattaaaactaatttttctgaaaatagcaggaaagaaattgtaattatagtaagttgtaatgaattgatatgaatatgttatatcagacaaaactgttgtggtatgaagtagtcaatagttttgtattatccaggaagtgcgagaaatatcaaacagatatttctattaataatcgaagacaataattgatacaatcgataatacaattattaatacagtctttatacactagcggctatatcgaacttatatctttattcttatcgtcgtcgttttccttgttatcgatatatacaatatataaattatctataagaaaatggttatggaagatggttctttatcttcagcaaatgttgttcttttacatgttttctagagcacaattaattattcagattgatacattaatgaacttagtgatccaaatcctaatatttattatactaattcaggtgtactggtgaattagtaactgcaccctaatttattagtcatggtaatggggtgtaccaatgataaatgacacaattcttatgattattcgtaataaatgtgtgaattattaaaacaataaatagttctaaattcattcaggatcatatgtaaccttaatggtaataactatcttattccacaacagaaaatgttgtagtatggtgtggtgaagtcctttgtgtattccagggaagcgcaaataatattaatagtaattcaaataatcgagacagtaatcaactatagtcgatagtataattactaaacggtcttatatattaagcgacttatatcgagctaatgtacttattcgaagttccttgacttgttacttgcttgttattctccttttgttcatatataatatataaattatttacaagaaacggttatggaagatgatcttttatctcctgaaaacgttgtccttttatatgttttctggagctcgatcgattattcagattactacattaatgacttgactgattcaaaccctaaaatttattatattaatttaggtgcactactggattagaactgcatcccaattctctaatcatggtgattagtaatacacgtgggacttaataaaacaataggtaaattctagatttgccaagatcttatgtaatccaatctttttattatgcagcatctaatgttgtagcacatgtaaggcttattaatacactaattggttctagattcattcaggatcttatgtaatcttgatggttataactattctattccacaacatcttcctctctctcttgggaaccttgtttccataattgtacgaaattgtcaattaaagattgaccaatatttgttgggagtaagttaaattcttctactggatattctactgtaatagtcggatcaacatcttccatatgacaataaaacactttgttatctttatcgtaaccgactacattaataatttcatgtactcttaatttcctttcggcagcagtattaggcggatcttttggatagcggtcttttctacgttttaacggttttagtttttcaacattaataactctgtgagtctttttcatcgaaggtaaatctaattcgtaagcattgtcatttattttcttaactaccttaaatgggccaacgtatatgggttgtagctttagatattgacctctcttaaaataagcatcacgatgtagcagtacaaaatcaccaatttcaaaggtaacttccttcctccctttgttatgtgtaacttccatgttgatctgattctcagttaagaaatcttttgtgcgtaaagtaagtgctttcaactttgtggctagttcttgtgttgaatcatgacgggaagaaacagcatctcctgtaactatgattggttcattagggatgtatccaatatctacttcaaaaggagctgtcttggttacgcgattgggagtagagttatagacgaattcgatgtgaggaagtaaacgatcccattgtctatgattgttaccagtataagtctttaataacctattaaggatctgtattgtacgttcagtttgaccatctgtttgtgggtgatttgctgtggacattttcaattttatattcaacctttttgccatttcttggtattctgtagaggtaaaacgagggtctctatctgaagtaatggaatatggaaatccatggtaagcgaaaatataacggaataaagcattaataacggaagtagtatcaaatgggtaactaccagcaattaagtgagttctttttgaaaacatgtcgactacaaccataatcatgtcgttaccttgttctgatttaggtaaaccagatacaaaatctatgctaatatttaaccatcgaccttcgggaacttcagaaggcatcaataagccctgtctattagggcgatgagatttaatcaactggcattgtatacaggaagagacatattcattaacagagtggtgtaattttggccaataataacgacttgcaattttattgtatgtaacggttgaaccgaaatgaccaccataaaggccatggtcgtgatatattcgaaggacttcatttcgtttagcgtcgggaacaacatagcgttctttaaagtaaataatattgtcattaattgtaaaacaatggcgaaaggttcttgataagttcaatttcttcatatatttcttgaacaatgatgagttgcaaatgggtaagtcttttgtatcaagtttggtaatataaacaaaacaggcagcacataatgggtcagctaggtattcttcgtaccaatttttcggatctaatgtgacggcagcatcttcaatagcagcaatattgtaatctgctctggaaatagcatcagctactacattctttggacctgctaagtattctagtttaaaatcatattcggctaattcatttaaccatttaattactctacgagagggttctttgttcttttgtgccgttagtaaactaatatggtctgttctcaatataaaatgcatgccatgaagcatatatttaaaatgtgataaggcttcgacaatggctaggagttcaagatctccagcagagtaatttttttgagcgccttgtaaagtttttgaaaaataacccacgaccccgagaatttttccttgctcattcacttcttcgagtacagcacctaatccattctttgaagcgtcggttgttaatctgtaatgaccatcgtgtttaaaggagactaatattgggtttgagattaggtgtgactttaatgtgttaaagctctcatcttgatccgtcgaccacttacttttaccatgtatgtaatcctgaatcggttgttggatgtgagagcagcggggtataaagcgtctataatagtttatcatacccaaaaatctttgagcttctttaattgttctgggagtgggaaattgttctatagctgcacatttcgagatcaacggttggattttattagcagagatagtgtatcccaaaaattcaacagatttagcggcaaagttacattttttcttttttacaattaatccttcttgagttaacctttgcaatacgatgtctatatgtttccaatgttcatcaacggaacgggagtgaattaaaatatcgtcgaggtaaacacagacatatggtaagtccctaaataaatcagccatataacgagcaaacgtgcttggagcattaacgagaccaaacggcatgacggtatattcatactttccattaggagtaacaaaagcggttttgaaacgatcgtccattttcataggtatttggtgataccctgagtggaggtccaaagttgaaaaaatggttgaagagccaatcttggccaataggttgtcgattctaggtaatggaaacgggtctttgattgtcacagtatttagagctctgtagtccacacataaacgatatgtaccatctttctttttaactagaaccactggtgaactacagggtgacttggagggtacaatgaatttcttttcgagaaggtcggcaacgatcaggtttatctcttgttctatttttggtgtcgtctgatatggctgtcttctaggcaggcgtgcacccggcttaatttcgatctcgtgttcaacctttggaggttcagcgaatttcttaggtggtaaatcatcgcggactgtagcagaatatttctcttttaaccagcgaggtagtttatcaaatcgatcatctgtatctgtttcagaaatctttatagcaaacacagcagcagcattttcaacatctaattcttcggtatcattctcggtaagtacggatacaatgtattcagggaccggtttcttgttatttaatatcttgtggagcagcgggtgagatgatataatcgggtgtcctattatgatttcaaaagtaatagcatcagttatgtatacgggtgttttaatttttatgtcatcgagttcaagtaaaatttcggtggattcgttagtgtatgacgattcggatgatacaacacctctaaaacggaatggcggagcggtagaacgtgttaacttgaggttgtcagcaatatcggctctaataaatgatgtgggggaaccagtatccactaaaacattgacaggtttttctttaataaacattttaatttggcaactgttgcctacgagtggatggggagcggacacgatgggagctagtgtgacggttttgttgtagaattgtttttcatttgggactgctcgccttacggttagggcagtcactgtagcggtgtaatggcttgtaacaatagaaacataaaccatgatcaatacaatattgacgagagggacgcttaattggttgtttgtttgcttgggaagatttgtgatttccctttctgccccctcttccgtgtgaacgataaacagcagcaacttgaggatgatgatcagtagtagagtccatagggactgggttaagagcagcggtcatatggatgtctccatccatatcataggtggtgaaggtaggaaatgaacggttggtgatggaaactgtttcactggcagcttccatagcagcatcaacagtggtagggcgagctagagctaccatacgggcagtatcaggagtaagaccgcgataataaaaaagtaattctcccttgggagtccaaatgtttgaaggcatcaaagctaatagttgtgaaaacttttgattataagcgtcaatgccaacggtagcttccttcaagcgttggaacgcattgaggatggcatgagggtcgatcataccaataaacttatttttaaaatccacaaggaattgttcataggaatgttggtcatgattacggatccattggacataccattgagcagcgggtccagttaagtttcggccaaaaaaagctatacgatccacatctgtttggaggtttcgagcataaagttgtgcttcgacagtaacaaggaaatctggtagtttaaataaatcatagcgaccagagaagcgcattggagcagtactgtagtatttggaatcggatgggactggagcaggagcagaagtagggtcagcggttaggttagtagttggagcaggagtagtggttggtgcggtggtatgatgttctgtagccgtagatgcatcaatagcgtctaaaaattcgttcatatttaaattattcgaggacatgatgaaataaacgctaccagttgttgtagtatggtgtggtgaagtcctttgtgtattccagggaagcgcaaataatattaatagtaattcaaataatcgagacagtaatcaactatagtcgatagtataattactaaacggtcttatatattaagcgacttatatcgagctaatgtacttattcgaagttccttgacttgttacttgcttgttattctccttttgttcatatataatatataaattatttacaagaaacggttatggaagatgatcttttatctcctgaaaacgttgtccttttatatgttttctggagctcgatcgattattcagattactacattaatgacttgactgattcaaaccctaaaatttattatattaatttaggtgcactactggattagaactgcatcccaattctctaatcatggtgattagtaatacacgtgggacttaataaaacaataggtaaattctagatttgccaagatcttatgtaatccaatctttttattatgcagcatctaatgttgtagcacatgtaaggcttattaatacactaattggttctagattcattcaggatcttatgtaatcttgatggttataactattctattccacaacagaaaacgtggtttattggttctatagtgtagtggtcatcactttcggttttgatccgaacaaccccggttcgaatccgggtaggacctgttttttgcttttttgccttaaatttatttaaaaattgtggaaatgtgtattagtaatgttatcacagttgattggctgaaaaataaattgtgggttcaaatctttttctttttttatttgtttttttttttgtcgctgaggcatctaaatattattaattaaaatatttcatagagaatccaaaccaaagaatttgtgaaggaaccttataccacacatcatcatgtctaatgaaagtctgatttacttcgttaatccttgtttttcaattaagtattgattattctccaatttcagaggttataagatacacggttcactaccacttaaataaatttcgacgcacacttttcgatccttcttttactagtttcatctttttttacttcgtttttcttgcgtttattaagtaactttgaagatagtttgcgtttcaccaatataaataaactaacttgaagttttgcaatcaagttcttttgtgttaaaatctttatatttttacgaatatttgaaagattagtttatagagaagttttattattgtattttatatataaaataaataacaacacacaaacatttaactatcgtcaaaccaccaacatcatgccaattactgaaattaaagatcaagaccaattcactcaattgaccacagtggatgtccaggaaaaattaatttctttatatttttacactaactgggccgaaccatgtaaacacctaaatcaagtctatcaagtgatcagtgatgatgcatcaaacaaagatgtttcatttttaactataaatgcagacgacttaagtgatgttgcagaactatttgaagtaagttctgtaccatattttgtaattatcaacaatggtactattttgaaagaattctccactgcagacccaaaagagtttgtgaaggaattagatcaatgtaagaaatatgtttctaaccaaactaataatactactgctgatggtgaacaaactgaagaacccgaaggtgaaacagaggaacaaatcaatgaaaaactaactaaattgacgaatgcagcacctgtgatgttatttatgaagggttcaccatctgaaccgaagtgtggtttttcaagacaattagttggaatgttaagagagcatcaagttaggtttggtttctttgatatcttaagggataatgacgtcagagaacaattaaagaaattctcagattggccaacttatccacaattatatattaacggtgagttccaaggtgggttagatattatcaaggaatctttagaagaagatccggatttcttccaacatgcgttacaacagtaagttgcatccttatgaaattagataatgtttataagaacgtggttatagatgatattaatatgtatagagagagagtatataacattaactctaatatatatctgctgtcccctctattgctttctgtattgacaactgattgtaatgcataggttatgtgtgtgtatattcgttaatgactgattgcaaggctgaatattatgtaatatctttcacacgtgtaatttcttctcttcagaacagatctgcgttggatctttacgcgtttttcttccggtttttgtatatttttacgtgttatatatatatatataaaggaacagatataaattgaaaataagtcctttttacgcgttccgaataatcaattaatacatacacacatgcctgtatcaatacatttcaaccaggtttatttttcgttctattcaggatatactcatcataataaagatcaacgatttgaggaacattacgttcataaatcattctcatactgagccggttattgctactattattattatttattcatcttctttatattcctctacagctgtattaaaacccattgtgcattttctatatttattcctaagatcaagtgttgtctataagataaatattttaaaaatatggctccaattactcctagagcttccaaaattttgaaatccaagaaagatacaaccccatcttcctctcaaaagaaacttaaacaatcatctctattgtctttcttctcaaaacagaaacctgataataatatagctactcataataaatcatcaagagggtctcctatctctaataaaaccaaaatatgtaaaagtaatgatttcccttcgtctgtaggtgaaagtgataccactttaatagataattcaaaattaataaagaatgataaccagcctgaacctaacacttcaatcactgtagatattgaatcaggagacgaaatggataccacttttgaggggaaaaataatgcgattgataatatgttaaagtcgacttctaaatcaggaagaattaaaaggcatataaactatgccgagagtgacgtggaagatgaagatttacttttatcttcatctaagaagagaaaatcaaatatgaagaccaaattatttactgaagattcagattttgaatcagatgaatatattccaacaaaggaagagctagaaggagatcaagatgttgattatgaagaagaaaataatatcaaatctaacaatcgtttgggttcccatcaaaataaaagaaatgattttgatgatgatgatgatgacgatgaagatttattattgttatcaaatacacaaaaacgtaaagataaaccaaatattagcaagatacagtctatatctaagcctgttacaaaattaacaaagccaaaattggcaaatactacaataaagaataaaaactttaacaaagttaatgaagaaaggtattcatggttagttgatgaaagagatgctcaaggaagatccaccaatgatccagagtatgatccaagaacattatatatcccaagtagtgcatggaataagtttacaccctttgaaagacaatattgggagattaaatcaaagatgtgggattgcattgtgttcttcaagaagggtaagttctttgaactttatgaaaaagatgcctttttggcaaacaatttatttgatttaaaattagccggtaatggtagagcaaacatgcaactagctgggatacctgaaatgtcatttgaatactgggcttcaagatttattgatttgggttataaagttgcgaaggtggatcagaaggaatcaatgctggcgaaagaaatgagagaaggttctaaggggatagttaaaagagaattagaatgtgtattaacgtctggtactttaacagatggcgacatgattcatacagatttagccacatattgtcttgctattagagaagaagctggtaattattatgatattaatggtatttttagtcataacccggcgactgcatctctgtcaagtaaaatatttggtattgcatttattgatacatcaactggtgaagtccaaatgacagaatttgttgatgacaatgactgctctaaattagatactattatgtcacaaattaaaccaaaagaaattattatggaaaaaaataatttgagtagtttggcaaataaaataattaaatttaatgctgcgactaatgctatttataatgttattaaaccagaaaaggaattttatacttttgaaaagacatataatatactgatatctaatgaaaatgatatttttgaagatgaatcaaaatggcctcaggtattacgagattattataagggaaataaacaggttgggttcagtgcatttggaggtttattatattacttgaattggttaaaattagataagagtttactatctatggggaatattaaagaatacaacccaataaaattacataatgcattaatattggacggtgtgaccctacaaaatctagaattatttagtaatacatacgatggttctgataagggtacactgtttagactatttaacaaagctattactccaatgggtaaaagaatgatgagacaatggttaatgagaccactatataataaagcagatattgagaaaagattgaacactgtcgatatgtttatgtctgatactgatattagacgtcttctcgaaacatccttagcaagattacctgatttagaaagaatgctaactcgcatacactcatgtaccataaaggtcaaggattttgaaagagtaattactgcttttgaagaaatcatcgccttggtagattcactccaaaatgaggtaaaatttcaagataacataaagacaacagctttaggagaatatcttcaacaaattccaaaagccttatgtgaaaatgtgactacctggtctaacgcatttgatagacagaaggcaactatagataatgttattattccacatcgtggagtagaaccagattttgataaatccttaaaagatattgaaagtttagaaaatgaattacaagaattattgaagcagtatagaaagcagtttagatgttccaatattgtgtacaaagattctggaaaagaaacctacacaattgaaattccaattaacgtgtgtaaaaatgtgccatctaattggacacaaatgggttcaagtagatcaactaagcggtactattctgatgaagtgaaagtgttggctcgtcgtatggcagaaacacgtgagagtcataaaattttagaagaagagttaaaaaacagattatgccttaaatttgataaaaattataacaatatatgggtacctacaattcaaataatatctcaaattgattgtttgattgcattaacaagaacatcagagtctattggatttccatcttgtagaccagaatttgtagatgaagtagatcctttaacaggtaatagattaaatggttttattaaattcaaatctttgagacacccctattttaatgaaggtagttcagttattcgtgaatttataccaaatgacattgagttgggaggtgatcaaccacaattaggtctattaactggggctaatgctgctggtaagtctacaatattgagaattacatgtcttgcggtaattatggcccaaatgggttgttatgttccatgtgaaatggcaaggttgagtccaattgatagaattatgactcgtttaggtgctaatgataatattatgcagggtaaatctacattttttgtagaactatctgaaacgaagaaaattttagatatggctacaaatagatcattattggtagttgatgaattgggtagaggtggttcttcaagtgatgggttttctattgctgaaagtgttctgtatcatgtagcaactcacattcagagtttaggtttttttgccacacattatgggacactaggtttacaatttattggtcatccacaagttagacccatgagaatgcaaatccttgtagatgaaaagaccagaaatgtgacatttttgtataagttagaggatggagctagtgaaggttcttttggtatgcatgttgccgctatgtgcaatattcccatgagtgttgtcgataatgcagagaaagcagctgaggaactagagaatacttcaaaactgatgaaacagttgaataatatacatgaacaagctgttaaaaatagcacagtatccgatggattacaaagtgatttagttagattgttgtatggatctggactaaccaacgatgctatgggcacaggtgaaggagttgcaaattacgattctaatattaagttgaatgtattgaaaaatctttttaagttaatagaaagtacacagtaagtattatgtatgtagttattacataaataatctattgaacatatataaaagaagaatggattaaactggtcgtcatatttgttgaattagttacaaaaaattattaaaggtgaaaaaataaaaaaagtagtcaaagaaagaattggtaatcaaatgagcgtgaacgcattcatttgaataagttaagaatatgaaaaattagtttctatagcctcatttacaaggtatcttcttgtttaaatgttgtaaaacatgatccctccttttaaactttttgccacatttggggcaggaatgtggtttttcaccggaatgaacagattttttatgtctggttaagtggtgaccagaagaaaactgtctcttgcaatcacaacatacataaactttgccagagtctgttatcaacacttcactaggtagaaatctagtttgagattgatgtgaggtaaaagtactttgtgaattattgataatttgttgatgttgttccacattaaaatgtctttcttctttagtcggagcagcatttgagacagtgttatcttgattaaatttttcttgttcttgaaatctactatataataaattgttataatctaaagtagtataccttttctccttcttctttgatactccttttcccaatttttcctttttattggtcctatcattaatttcaaggtcattttcgattaaatccatactatcattatgaaaggaaccattttctagtaaagaataaggattagttatgtttccattatgggtaaaatagtttggttcattattaaccattaaagaagaattcattaacttacttggtttgtttacagtgccatatcctacatttatattatatcttccaaaattttcgtttgataatggaacagtcattgataatgataggggactctcagtgattcctcttgaaatatttaagggcaaaaaacttggtgaagcaattcttcttatcatatcattccttgttgtagatgtgttaagacatatttgttctgggtttggatagtaacctgtatagttaaaattggtagtattacatttactattattaatgatattactggtgttagcaatggtattattattactgtcactactgttattgttgttattattatttgataacatttgattggttgaacttgtcaacgttgcaggattagtagtaactaatttatagttttccaactgtggagtaagtaatggcggtaaaggtacatgcgatggagatgtcatggttttggatatttgagtggaagaattgacattcatcataatatttgaagccggaatgaacttattcttaaagatatgtttttgctgtaagtcatcattaataatatcagaagaggatgaatttgttagataaggtccaactttatttttatcataatttatatctaaattagtttgattgtcatagtgtagtctgtcgttaatattcgctacactttcaatagatggtaataaaaatgtgtcgccatgattccccttttcattgatattgagactatcatcataatttgtacctccactacttaaagtggttgttgtggtatttcctgtatttaataatctagaaaatagaggcgaagaaatcctactaatagattcattgaattcatttgttgataatgaatgttctaacgttgatctggggatattagtggaactattaagggctatcatggtgggaatagtagtacaattcataatatttgtaggattatctttaattttttcattcctattattgttattatcaatacatagacagttttgtaatatagttggtctgttatgatttactttaaaattaaattggatttcagatattctattgtcattagttagatctaaagcaaaagtacatgaatatgggaataaaacaatcatttcattactatattgaatagttttggtaaatctgatgtcatggtcaattaaccattttggatgtattataaaatcatcgtaatcaataaatttttggtttaaatttttctgtgcacttgaaatttttagctttaaatctaaattttctcttaaaatcttgtaaaatttacaaatatcatcttcaataattgaataccaaattcgtatgttgtttttgttgtctttgatacttttattattattataattatttttattattataatgttcactcttcttcattttattattgtcatgtaaataataaatcttaaaagtacttgattccaaaatttcccaatttttgattaaaccaactgaactttctacaaatttaattttagaatcatcttgtaataaagaaatgttcctattacttaaaataaaattatacaattgtttttctttaggagtctgaatattattattatcattattattataatcattattgttgttgtcatgttttaaattgatatcaaaaagggtataatatgcagaataatttaatagattatcccaaatagtatcttcattaaaagtgttattattcaggtgttccaagttggttttatatttaatctgtttaaaatcattatcattataagaatgggtatttaacagatgcacactattgttatgtgtactattattattttttaattcaacaataaaatgttccccattatatttttgcctgttattagtagcagtggtggtggtggtagtagtagcgtcattgtattgtgtagcattattcttgtgacctgtatcataaggtaatattttacaaataccaactaaataactaaattttgaaattttattcaaatatgtatcaaaattatcccattctactttattaggttcaaagatcggtacttcaagttctttatctttgtctttatctttagcattattattagatgtcatgttttctaacaatttaatatcatcaatccactccatcttttctttttttttttttcttgctttttgcttatactatctttattaatttgtttgtctattccctatttcaattgaaacacaacaataaaaattaaaaaaaaaaaaagcaacagaccctaaatttactcttttttttaaaaaataaaaaaaaaataacacgttctcctttattttatttggagttttaaaggagccttacagtagtaaatattttaaatatgtaaatacgaacttatatctttagttgtgagtgatggtagatatattgcttgggtataatagaatacagaggaagaatagggagttatttaagaaataaaataaaataaaataaaaacattaatatcaaaaggaaccttccaagactcgtatataactaaagtaaatttaatgagggataaaaagaaatctaaagaaacattgtgaatatttgatgtatctagcaaaacattgctaaacgataaacaagagcaaaatagactaagcaactgaaagactaaaaatatgaacgattaaaaaaaaaaaaggttaaagggaatgagaaagggttaaaaattcttgagaaatattcttacatatatatataaatgtgtgtgtatgtgtgtctacaagttgtttctttgtttttttaatttgtctctcctaagtcaatgtaaaataattgaaagaatggaagaaattagatgtacaatgaaacgcgcgcacacaacacacacacacacacacgtacatacatacatacatacatacaaagacagagagagaaaaaaacaaataaatacatgtcttcatgtggtgagtgggtgtttactatagttatttctttgtttctcttttatttctaattagttgttattaacaaataagatgaagctacaaattgtcacattgattggtactgttatcattattacaagtattataattgttcttgttgtctcttgttgtttttggctacataaaatagcaataataaattaatttccaagaccgaaataggttgtcaataagacgtcatcgttcgcatttgttttgttttgttctttttctttgtttattattccataaaaaaaagagaatgactagcatttgcgaagaacacaatagattgataaaattactttacttgttctattgtcttggggaatgatcaccattgtaatagttttgtatccattaattattactatttgacgtttgtaatattaataacaacggtatgtatatatttagttgtttaccttttttatttctcagcttctcctctgctcccctataatattctctaatataatcagcaattttaacaataataatgtaacatgataatgggtctaaaaaaaaagaaaaagaaaaagaaaagaaaaggaaaggaaacggtatgtttatttttttttattattatttgaatacaaaagtgtctagagccgatgtctctccaacacaagaaactaatatacaagacatacacacgttataatactaagtatagaatgtattattttagatatacattttccgatcattcagttatggaataagtcttatgatgagataaaaaaatgaaaacatgtatccttccatcttcttacccatttttactgtgtaagaatagtagacacatcatctctagtatacgctattgcatattattgtttgttatttattacattatatgtatgctactacatacagtaatgcaaacctaaaaatattctgtatcccttaataagtccgtaatatctactgccgcagatatttctttattaataatatttatatttctataattatttgattctaataaattgttgtcattattattattattattattattattattattattaccattatcataaagattattattgttgctgttattactgttattattaaggttgttgttatctttaatcggtgataataaatttgacatatatgacaaatcaccattgctactataactatagttattatatttataattataactgcaatcaggagataataaactatccactgtatcacatgatagcaattgttccaaatctaatcctgtctcttcttgttctgagtcaacagtattgtttttatctttgccgttttccctatattcatatcgatcatataaaatagggaataaaaggttattattagccattgttctattactgttattattgttattgttagtacaattatcactattgtccgtattaaaatcataataagctatcgaagattgatctcttttgtatttttttatattatctaatttatacattttagtgggttgattttgccatatatatcctgattcgtcttttgttgatatggagaggctgttttttatctcttttgtattcattgtaaaattttggttgctttttaacattttattaaagtctaaattagcatcgttttcattacatataattgaatcattgttataatgattgccttttccattagtatggttattatgaggtttattattattattaatattattgccattattttctaatatataattaacaaatttaatatatgggtaatgcaaattattaatactttttcgtctgtttttcttttttataacataggaacccataatacttgcgtttgcatttgcatttgtatttgcatttacgtttacgtttggccttcgaattattgtatggttatagttatttgttctatattctgcattccatattagactatctttatttcttttgtttgttattatgttatgttcaccataatgtggaattttccagggaatattcgtctctaacccacattcgtaatctcttaatatatcattatccatttttttttattatcttttaaaatatatatatatatatatatatatatatccactctatataaacacttatatttgtatgttggttaccttatttgtttgaaataaaggatgttttagtttgtcattgttttatcttaactgagcgtaactaatccatttattgcttactgtcataggatgtatatatttatattttccttggtaaaaaaaatgacagatttcagggagttgaagggggtttgggtaaaaaaagatagagaaaaacaaaagaaaggaactgtctgttttttatttaacatctatcattttgacatatgagaagatgtattgttttttttattatcgaggacactaacaaagaaaagatagaggaatttacaagaatttttattgttatgtaattgtatggatttcaggggcaagaagacaaaaaaacaaaaagcttccgtgttttattgttgaaaatacttgacgtttgacatgccgaatttctcttgctcgtaagtttagtttcaaactattttatatgataaaaaaaataaagaacaaacaaaagatatatatagatatatatatgcctatgtatataccaaatgaaaaaaagaatttaaagtatcgtatgtattaatactatcacagggtactatgtctatctttatatacatgtctatcaacattagaaaaaaaaaacaataataaatatcaaaatattacaagttcatttacatctatctatatatatttttgaatttttagattctatcgtttcgtaaagattttttttttttatttttttattgttttttcatttacttagtaaacttgatgctctagttacaccaggtaaatccaaggataatctattaccatgtatgctattacggactctggagtttatatttatatttatatcttcgctgttagatgaagaattatttgcatcttgatgtaatccaaccatatctttattgttgttaaatttcatatcatataatggatattcttcaacaattaaactctcataactgttattataattattgttactattttcagtattttcatttttaaatggatctaaattatcataccgatccaacttttcaatcttaacacaatttggatctgttggatcataatcttccggatatttatcaaattgtcccttttgccacatctccctaataatatcgatatcattaggatacaataatttctgtatgcaatcataaaagaatcttggtattatacagaaaaatactccaataaatatcactgcccaatatgacggcgtattaaacactcttgatgcactcttgaaaaattcaaaactgttcagtgaactcgaccagatacctgtccatccaaagtaacagatagtagataagaatataaataatacactaaaccaatcccatctacgctgctccatcaagatatacagattagctgctatcacacagatccctgtcacaggaataccaacataaaatctatggtccaatcctaatccattttgtgtcacaatatcattaggacggtatagcaagtatgggaagaaaaatgatatagctgattgatagataccgtctagcatataccagaaaaatctatattgactccaatcctttcttaatatccctgatatatataactccggtactaccatagatattttagccgacacgtcttgatccagaatccctaagataatcacaggcaatgatgtaaaggctaaattgtaaaatgttaaatatgtgaattcaaataaatacgacccatcaaaatcattataaataccgtaccaaaatagtgcaattgtaaaaatgacatttttgaaaaaaaattgtggtaccatctctgctaatcttttatatgaccaacggccatgcactagcaataatctggttaaatatctaaattggccaatagcaaaatctgaacacatcacagcttgacgaccttcttctcctgctatacctataccaacatccgcagattggatcatagctacatcattagatccatctccaatagctaaggtcataacatctaatccatttttcaccatcttaacaactgcagctttttgtgctggagaaactctacaacataagacagccttgcaatttttacataataatagaaattttcttctcagttcatcgtttccgagagcaatttttaatgcatctccatcgataataacggcatattcaccttttggcaacgaatgatctttttttgctgcttctagttcttcttcagaacctgacatactaaaccttgttcttaaatattccattattaaatttgagacaacttccaaaggttcggagccatatttctgtacatcagatccgtctgtcttgactactaacaattccatatcattgtttaataaattgcacgaaaacccaatattaattgctgtttccactttgtcacctgttaacacccatagtttgatacctgctcttcctaacatagatatagattcaggaacaccatcttgcaacttatcttcaattgcagtaccacccaataaaatcatatcttgttcaatcatgtcatacactgtttctaatttgttctctctatcaatcaaggctgccgcagcaacgttatatttttcattccatttcaaatactctgaccatgacagctctttctgcgctaaacataatgttcttaaaccttcaatcgcatattgctctaaatgctgtgcagttttctccaaaacatcaatattattggttccttccttatgagacaaacgagaataaattactgaatcagcacccttacataataataaaaccttaggctcctgagtatttgtttgtggaattttgataatacaactcattctttttcttgttgaattaaattcaagaacattaagaacttcgaattctttctgtacaccttgtacttccacaatatagccagtctttgtctttccaataaagctaaaaccaacatctcttgctgttgttactaaagccacttcatccggtgactgagccttgatttctaatttatttggatcttgttcatttggttcgataagggcggtatgacaaagtgccagagctaacataaaatgttcgcaacttttcttttgctcatttccatgttctccttgcaaatcatgtacaaaatttttagaaacaaatgtgatttcttcaggataaaattgagaattgtcggcaatttttcgtaattcttcaatcatcacattaagatccttttcaattgcagccttttcagtagcagcttcattctctacatcaatcccttgacgttttcttaagccaagaagagcctccgtgtaagcacgaccataagagactccgttaatagtacacttcttaaattccataacattctgcgttaatgttcctgttttatcagaaaaaatatattctacctgtcctaagtcatcagatatattccaagattttgcagtacatggataatcaatcttttcgcagtataataagacatccagataaataaagatagcctgacatgttttgataatttcaattgaaatataaagggagattggaactaacgattgatatagaatcaatgcaacccagaaggaaagaaacccatttaatgctggtgtgctagcaatcgtaccaaattcaaaaaaatcacgagatgcaggtcttttattgtaatagacaccattaacaacaccagcaataaaacataagaagaaaaggagtacgaaattgattaaaactgataaattcaactcttttgaaatacgtgactttttagttggtgtaataccagcattcagcataattttagtatcatcacccgtaaataaaacaatacccatagcccatttagtatttcttaaagtacagccacgaagtaaagtattattaattgtaatcgcttcattcttcaattgcttatcagatggatcaatccactttaagttcccttgataggaatataagtttgcatgtggaccttcgctttctatccaaaatttcgttctggtaatgtccttagaacttttaattgaagaactacatctcaaagattgacggattttcaaatttgtctcaccatctaaatttttggtttctatgcaacatacaccgtcaggatcagaactcgataggataaccacgtcagcagggacttcatcattattgtgaatacgaattatgtcaccaaccttaacatttttccagtaatttttcttaaatttacaatcatccctgataggcatagaaaaatcgagaaactccgtctttttattgtgttcagatatattagcatctatgatttgattgtctaaagatggacgtaaatattcgcttgaaaatctatattcaccaaaagactctaaggagttacgaggtgacttctttcctattcttttcaattgttcttctcttagtttacgttgttttctgatttccttccctgtggaagtgaaagtttcgttaatataagttaaaaatttcattattacccttgtattggcctttttaaattttctccaataggatacatggtcaatgggaacattttcattcttaacaccatctaagatataagtttttgtattatttacttgcatgtctagcaaagctctccttgaatcttcaaatgcatccttgattgctgttaaaatgacaatgacaattaacggcacagctgccaatccaggatttgaaacaccgaatatttggaaagcacctaagatacaaagaatcaagaaatatatatttgcaaaattattaaattgcaacataatatttttgggaaaaaacattagtggtgtgtatttcgtggttctaattttatttcttggatatttcataattggcatgtcatcttcatctaacatttcatccggtagaggtaaattgaagaaaatggttctaaaatcatgttgtttattaggggtttcaaaagtatcagatttatctgtgtgataaatatctttaaattcattgacagtatctttaatattgtttttcacgttattaaatgccttctttgaacggaaagctttctttttacgtttttcttttctagattgtattcgttcatggtattccttttgattactggcatattccgggaatggagtagaagatgattcaacatgtgagtcaaaaaaagtagtgctatttttcatctcatcattgtcaataatcatttcctcaaatacattcttatcatctaagcctgattcctctactttactatcatcatcattattcaggcgaaatctatcatcgaatggggatcctctagcataagattcctttgtatcttcaccataatttctatcaaaggtaaaactatcctgtgacatgcttcgggaatagtaatgaaacaatgatgcgattctggctaaaggaactattttcgttttagttagatatttctctctctttcttcttctatttgtatttatactttctgatatggttcttaagacgactataataaagggaaaaaaaaactaagagaattaaatacctctaaaagaatgttatagtaatatttttattgttgaggaattgaaaattcagttaatgataactttaattttaattttcttcctacagtttgattcgttaaagataatacgtttaatataatattgaattatgggatattattataagtatgtttgtctttttgcaacatagtagataatcacatataaaattcatccactattactctttattattcatactgaatagctaattaattgcgaattgaaagatctgctgtcaaaaaaaaaataaaataaaacgctcgtatatttaattttttttttttttttttaaaaaaaatcgatttagggctatctgtgtgaaaatgacggggaaaaagagtaattacatgcatttttcaaattatgaaaagagtcctatctatatatggattgtatatataatgaaagatctgaaatactttcaatttatttactccatataagtatgtgtatttttattaacctgttaaatagcatcaattttgacacttcttcaacataagaacatactaaattattgttagaaagatatacatttatgtatatatatgtattatatcattacaaaaaaagtgaaaaaaaaaaaatggatgattaaaaaaagaatttactttctcgatcattacttgaaatttttgtatccagatataatatatattttcatcttttcattttttttcttttccatacaagatttaatatttatatttgtaattattatgataatataaatattaatttaaacaaaaacaaatcctgtaagaactattgaaaaattacagaggaaacaaaaaaaaaacaaagaagaactttttttctataatgttaatttttcttatgtgcatataattcggtccattcacgagctttattcttggcaccttgttcgtttttgatccaatcttcagctacatcattggctaaaggatcattgggatttggactagccagcaaggcttggatagacaataaaacagttctaatttgtagagcaggggaccagttagtcttcaatatgtcaagacatatacgacctaatctatcgatatttgggtgataaatttttgttagaaaccttactttgggtgcttccattggatattcatcaggtaaatataattctaaatcaaatataccattttcgtaaggtgatcctgctggaccttctatagtcacttgaaaataacgtagattatcctcatgtggtgttgctgtaatacctggtactggatcacttactaatctttcagtttcctatcaagaaagacacagctcaaataaaagtgagtttattaaaatagtgttagtaaggttataattcgattactcctgggaaatgatattaaaataataataaaaaagtcttacatacttttataattcttttaggtagagatgccattttggtacgtggataagacttatgagtgtgtgtttatatgatatggacaaaattgaacaaattaaacgacaaatgctccgataggtgatttattatttaatcgtattaacccagcaaatatagttccgaatcaggataagctagagtcatataacataccaactaataaactgtctttctatcagttgtattatatgcacacgcatcaaacaaaggaatatcgacgttttctcccttttatcaaaatctgcaaaaaaagaaaataaaaaaataaaaaaaagttttaagacctccttcagcttttaaaaagttgaaaatcgcagagaaaaaaaaaaaaaaaatagaaacaaaaattctttacacacaaagtttaagccattaaaacaaaccagattgatataatgttgtggataaaagaacattggtattggagttttattaagctggcatttacagtacaaaaaaaaacattagatatgaagttatcaatctgttttttcttttgtaccttatttatttgtatggaggagatcaaccactacattttttaagattgattaaatataggaattctgtattgatattatttgtttttcatatatagatacatatgttactgtatactttcactattattaagatagtaatatagttcgtatatattttgttgtcgatatagtatcatgacactggctaagactttttcaagaaagattttttagaatttttagtattgttgattttacttctaggtctatcaaatatatttatcattaataaaaagagaaagcaaaaaaaaaaaaatatttcttctttatgataccatttattccaataaaaaggattgatggttaaaatttcgttttggaatcatttttttaggtagattggttccgtgcagtagatcttaagaaattttattgtggtgcattatatactaaaaataaattatttgacaccatttaaataaagcaaagataaaaagtatcaaaataatgtaaatgattgataattgtcctctggatgaataatattagtatacatgtttttagcgtcggtaatcatattatatgttattattaggtattattattatggtaatatgtagagtaattttccctcgaactcttgattgggaattaataattatataaatataaaagaaatatatgataaaatgtatataacttattcatccagattggaaaattaataagtaaaatcgcctatttatatatgtttaccgtttggcaaatcttcataatatattaatttattttcattctgtttgatcttatctccgtaatattgaatgtgcaaaacatacatttttcctctttgatatatttacatgttactcaaaccggtaatatatcattccagcaaattgatactttaggatatatatttagtaatttaaataagtttttgtaattagttgtttatttggctagtatacttttcacactttttttttttattttatatttggtttcggaaatttctatttgaaatgtacaaaaaattaagtccttggaatgaaatttaactcaaaagctattacatttagcaccaaattaaaacgaatcctatttctagaatactttttttttaaataattttcaaatacagttttggaatgctcttttgtatttctatatacagttcttctgtaatgttttttatcctttccagtaaaatgcgacaatatttgaataacttttctctgttctcccctttatatatatatatgtatatatacaatataaaatatagatgaaaatttgaaattatcaaggttaattaaaatacaaaaaaggtgaaatttaaagaaatagaattcttataaagctaaaatagaaaactttaacacaagttatacatgtaaatgtactccctatattttatcatcaagataaattccataaaaaaaaaaactatagcataactgacccaaaaaagatcaggttcatgcaaggaacctaactggaaatccagtagatacgcaattccgagggtaacacctaagtgtctgggtggaggattggtacggccatgtgtgcagtggctcgtagaaggtattgaatctgattggacgatttccagggagtgagacttataccagatcttgccaagaggcctttgattattgagagatatgccaggggtaatcatcttatttaaatacatcttagtaatgatattaagagttgcctcttaatatcatacaagaacaacaagaagaaataatacaacatcagggttattaattagtaatatatagagcttacgtaagagtgtttatacttatactaattgatacgattcatccagttacatacaacaactcttacaattcattcttttaaaatctacaaaaagaacattgtaatttaaggtacaaaagtaccatttatcttcctcaccgtgaatttaacttgtctacacacctgtcaaattctaaatataagagaaaaaagttgcaaaggaaggtcatggacatgatttaaaaactacaagatagcaatatgtctcacttaaaactcattcaaataaatacaacgaggtactgcaaactgttataaagataagaagtcttaaaatatgtaatatttgaattattcaaaatcatagatgaacaatagtaatattctgatgacaaatgcctttctcgaatccatataagctttcgtatagtatactgcgtctatttatctcctttacaattttctactatttaaaaaggaaaaaatatagtgaaaaattatctattttccttttttggaaatattgaaagaacctaataataaaaaaaaaattatatctctttttctttttaatgaattttttttttttttgcaaagatttatttctgtaaaaagaaaaaaaattggaaaaaaattttttcttttatgcgttttgtataggaaggaaaatttggcaaaagagaaaaaagaaatcgatgcccatcatgttgaaattaaatatgataatcccaaatattacgttaactaattttcattagttgttttttttatatattttctcacatttgtatattcttttatgtatgccgttttaagttcacttttttttcactacttttgaatgttttcactacttatcctttcagctctctctctctctctctttcttttcttttcttttctttatttccatatcaagattcattaattctaatcctgcttttgttttctgcttagatattaaagtgttttagtactattgttccctttaatattcaattccctttaattccatcttttttcttacttcctttacgactttcaatcactctgttgtaaataagtatagccaatcccattaccatatagatattatattgatctgtgtaacaggtgttccttttaccattcaggaaaacaaataggcaaactccaatagttaaataaaagactaaaacaagatgagtgaaaagaacagtcgtattgctatcgttaacggagatagatgtaaacctaagaaatgtcgtcaagaatgtaaacgttcctgtccagtggttaaaacaggtaaattatgtatcgaagttacaccaacctcaaagattgcttttatctctgaagttctttgtattggttgtggtatctgtgtgaagaaatgtccatttgacgctatcactattattaacttgccaactaatttagaatctaacactactcaccgttattctgctaacagtttcaaattgcatagactaccaaccccaagacctggtcaagtccttggtttagttggtactaacggtattggtaagtctactgcgttaaagattttagccggtaaacaaaaaccaaatttaggtagatttgataatccacctgaatggcaagaaattatcagatatttccgtggttcagaattacaaaattatttcactaaaatgttagaagataacatcaaagctattgtcaaaccacaatacgtcgataacatcccaagagctataaagggtccaattaccaaagttggtgaaatcttaaagcttagaatggaaaagccacaggaagacgtcaaagaatatattaagattttacaattagctcatgtactaaatagagatatcaccaaattatctggtggtgaattacaaagatttgctattggtatgacttgtgtacaagaagctgatgtctatatgttcgatgaaccttcctcttatttggatgttaaacaacgtttgaatgctgcacaaatcattagatctttattgaccccaactaaatacgtcatctgtgtcgaacacgatttgtctgtccttgattatctatccgattttgtctgtattttatatggtgttccatctgtctatggtgtcgttactctaccatcttctgttagagaaggtattaatattttcttagatggtcatatcccagctgaaaatattagatttagaactgaagctttacaattcagattaaacgatgcaggtgaagatttaagagatgatgcttcccgtgcctaccactatccaaagatgaaacgtactcaaggcgattttgttcttaacgttgatgctggtgatttctccgattctgaaatcttggttatgatgggtgaaaatggtactggtaagaccactttaatcaaattattggctggtgctatccctgcagatgatggtaccgaagttccaaaattgaatgtctctatgaaaccacaaactattgctccaaagttccctggtactgttagacaacttttcttcaagaagatcagaggtcaattcttgaacccacaattccaaactgatgttgttaaaccattgaaaattgacgatatcatcgatcaagaagtccaacatttatctggtggtgaattgcaaagagtcgctattgtcttatctcttggtatctctgctgatatttacttgatcgatgaaccttcagcttacttagattcagaacaacgtattatctgttccaaggttattagaagattcattttacataataagaagactgcatttattgtggaacacgatttcatcatggccacctatttggccgataaagttattgttttcgatggtacaccatccaagaatgctcacgcaagttcgccagaatctttattgactggttgtaacagattcttaaagaacttaaatgttactttcagaagagatccaaactcttacagaccaagaattaacaagttagattcccaaatggacaaggaacaaaaggcttctggtaattacttcttcctagataacactggtatctaaatctaacaataataaaaaacaaaagaaaaaatgaaaaagaaaataaaaataaaaaaggagaaaccacattaaaccttaaacttctgtacattataagaaagatagaaaaaaaaataaaaactagttattgtttgttgtttattcataattcagttatacttgtagggataattggtaaaaatattttaataaacatgttatagtgtttttctttccccaattgtatatgatattatatatatatgtatatttatgatatcgatctttcaatatttattttaccagcaaattatttatctatttatctatttattcaataacaacagcaacataccaataacctaataaatagtttgatgggttcagaaatatttcatgttactataagatcaattttatcacagaatttatattagattcccatttttattttatttttttttatttcaatggatgtcaatacagtattctttaagtcgaccaaatctaaagaatttttataaaatattaggatttatatcttgttcctcttccccattttaattcaaaagacccctgatatattttcaaaatgttctatatcttattgttttttatatcgtaataatgataaaacaagcagaaaaggtgaatatccgtacataatgttgttaagtgaactctcccataaacaaactgataaacacgcagtaatgcttctacccttttgttcactcataatgagaaatgatcattacacccacagttataccagccaatgcacttgttctggatcattaacccatccaggtcatccaagcaagaaagactcagccaacaagttatagtattgaagaggttgttaatacacaacgtgacaaagataaacaatttatgactatgaccactgtaatttctttgggaacactaaccgtctcacttaggtttgttcatcctcttttagtcagccatctttctatctattgatgctttctgtctacgaaactttttctttccttttcttttctttgtctgcttatctcgtttctttttctcagcagggaaaaattaaagtcatattcctttataaataagtgtgcatctctctcttttttttcttttttcttttttattttggcaatattcatagatatagagattacgtgtcggaattggtagatatgactcagtaattatatgactatcccataactatcaggttcaactgttaaagacaaagcactggtgtggacatcagttcttttgccagatcaattatacattaaagaaattatattgccttttttattttttatacacttgaatatatacagaaaatgatctcagatgaagcatctaccattctaggtaccattgcaacagtatgttggtgtattcaattgattccacagatcatatataattataagaggaaagattgtacaggtttgcctcctcttatgatgttcctgtgggtcatttcagggattccatttggtatatatttctgtatcagtgcaccaaacattattttacaaattcaaccacatttgttcatgatattttgtgcagtaagttttgcacagactttatattatccaccttgtcaaatgaatagattgaaaattgcagctatcatgttaaccaccaccctcatagatgtcggattggaagtagggttcattatctggctaaagcccttgtatcaaaagggcacaaagtggcctgatttaatttttggtatcagtgcatcgatcttacttgcagtgggtctattacctccatactttgaattgttcaaaagaaaaggcagagttgtcggtatcaatttcttatttctatttgtggactccttaggcgcatggctatctattgtcagtgtcatcgtaggtacaatggatgtcatgggtattattctttattgtattgtagctggcatggaattaggtatctttgcatcccattttatttggtgttgtagatttaaatggcttagaaaaaataaagagaccgataatgaactatcctctgtagaatatcacgaaaaagaaagtggagaaaccccagataatttaaacagtaaaatagagatgagtaaggacggaacctctcactcttttcaaagccatacaaaggaacttcatcatgtagtgacagatcatgatactgataatgaaataatagataatattgaagagtttgaggtgtacagtaccaccgtccaaactatccatggtgttacaatgcaaaatagctctattaacaccgaaagtatcagaatatagtgactctgggtatatcaaattcagaagataaagaaaaaaagacattgtaattagaatacttcatacaatattactattttatgacaaaattcaattgatttttttcaataattgtcatactcttattatatctagactcagtcagtgaatttttttaatattaaataattcattatgtatatgcatatacttatatattcaactttaaaagtatttttttttctttttacctgttctatagcacttaaaagtatatttcaattataccgtagcatacacttatcgtgatggtggtaaataatacaaatgaagtaacataatgccatgtgggagctaaagtaaatctgctaaaaagcaacaacaaagatactgtgattagaactaacgctataaccaaagtaaaaatgatactaacaattagaattgtctcatgggacacttcaacattctgacttttttccctgaaaagagcaataataatggaaatagttatactggtaataatagtagatgctaaaagagctgccatatataataatgatataatttcatcatgcctcacttcataagttgattctgtattattgattttattcggttcaagttgcattaatctttctaaatcatcattggatgctgcaatagaaccatacctttctctaaaaccatctaataatttttcctttgatttagaaaaagctagcatactctggatcctctgacacttgtcatacaaatcatcaataaaccttttatcaaacttaataaacccagcatcatatcgtgaataagataacgatgaagcatcatctccatccacattaatataaaacatttggttataaaattcagaattttcatctgcatcatcaaattcattccaatatcgtaccagttttctctttggattcaatgctttcacttgtgatatctttgataattccaggttattatgactggtgttattattgtcttttctttcacttatcgtcaaatcatttgcatattccgattgaacctctttagagcataattctacaagtgaactttttcctaagttgaaaaattcttcctctgttagacgatgatcttcatcaatcttatataaatcttttagaactaatgtaaataaatcttttttgctcgacctttgcaaataatataattctaatgctattttccaaagagttaactcatttggtaagggataacaattcaattttttattaattatggttgaatacaatttatccaaaaactttgaactcctccgtttttgtgtacatcttaattcaaatattgaataaggtaaagttaggttttcgttgataacaatatcattagatattgctaacatatatatattgttctgatgataagagataagccgtaaccttttaaaatcgatagtgggattgactggttttaagctatgtgagttaatccaatctataatcaacctatttatatgatgttcagtgtcacttacattggaagttgaaagcgtacatacttcgttagtagttgacataattttatctatcatattttgatcaataccagttgtaatacaatgatctcttattccaccaatatgacacatcacagcactatgaccagtattcttgttggtcataatcatatcaggaaattgatttatttggtctccatttaatatatttttaccctcggaagtgttcccagcatctattgaattaaataacaattgatattggatgtcatcttcccttttaatcttagtattattattactagcttgtaaatcagaattattatttagagtatcaaaatcaatattttttaatggattcactgtcaacaatgattgtgaacgaaacttggtaatatctctaaacgatcgtaaggacttaatcgaaggtttcaattcaatagatatatttgcattcgtagttcgttgctctagattaccatcatttgtagaaataattccgttagttgttttatccacaatattttttgttgtggaaatgatatcttcatcgaataactgaaaggaattggtcaataacataaatttaaattcttctacatcttctttagatataagaaatctttgcaaattttctgtttcagctaggaaaatcctatcataatctacaatagaagatataggttctgcctttgtagctttgattgatgtagatctatcattttcattttgttgtgaggattgggctctatatgatgcttccttaatgaaaagatcagtgctattttttttagctgaattcaaatcgttatctttattgtcgttatctgtattagaatcactagagttcagctttgttgtaaaatcattaattacatcaaatatcagagacaattcccaaaaatacggatccaaatcaatgttattgaatgagaaattttcatatccaaattcaaacataggcaagtttttaatatcattaattaattttttacttgattcacaatcataattatttgaaatcttttgaaataattgtttaacagctatcctttgtagaataatatatcttgataacttttctaattctctgctatatttgcttgtatgattctttattatcttcaattttctccttaaaatggaactatttttatcaaaagtttcctgttgatcctgtgagaacttaattatagaggattcgattgataaaattttcgtggaaatttctttaatctttaaagataaaaaaatattgacaatctccaattgttcattaaatgtgtcaattaatagttgtttatcatctttatgtgatattataatttgaccaatcttatcgtaatctatattattatgcttccattcaggcacagatttatcacgaatcaaactactaaaactcattgatccatataaaagaaatggtgaaaggacgcctagcagtatacaaaaatagattatccttataatatagtgctaaacaaaaaataaggtaatgataatttggatgagaaaaatatttctaacgaatagtcatatatgaataactatatatatatatatgcatgtgtgtgtgtgtatgtgtgtttatgtatgtatgtatgtatatgtaaatgtaacgcagtaaataagcatttcgatcagtcactatttgcacaatgagtatggaaaaataaatcttcaaataaataaatagtgaacacaaaatagagttctatataagataaatgtatatagattttttttcatgttatctcttatctaaggattgctgataagaccatttcgtcctagtatatacttaacttttatagactaagaactgtaggtatgttttcaagcctaagttatatgtaatctcagtattttttatatttattgacattcttattcttgcagacaagaaggtgctgctgaagggcactaccatcacgatatttcattttaatttttgcagtaaaacagtattgtttcatttaaatagtggatcaatacatttaccagcacaatcaaataactaaatactaatacatatctttcataactgtttatatatatcatcctctgcagtagtattcatatacaaaagatattattcatcattttacttatatatatctataaacatattcattgattgaccaaaatattagctacaaatttgatagtaatgcaacagcaatcaaacaaccctgataatcaaccaaaaaaacagcagtcacttcctcagcagcaacgaataagaaaaattcgacaaaatgaacatatcccccgatatatcaaatcacaaccatggtactatcaatcgttaaattcaaatgactatttaattcaccacagacaatcacaagataaaaagaaattattcgatattgagaataatagagaagcaaaagttggtggtggaatcaatgataaatttgtaaaaaaggaagtgattagtattgagaattacaataaatacaacattcaagacactggacacaaattttgtaagaattgtggacaactgggtcatttaaggaaagattgtcttgaaagaccaagacagataaagaataaaaatgtattaatacaaaaacacgaaataaaaaaacaagataatagagaagaaggaaacagtaaatttttgacaattagagatgatgaaaatttagattgggatgccaaaaaggatcgatggtatggatatacaggtgacgattatgataacgttgtacataaatggcaagcaaataataatgaaaatgcatctagaccagtagcatcaaataaatatgatcgagatgaggaaattgaattattcaaattgagattaataaaatattctaagggtttaataagacagcatcagttcagcgaacaagagaggaatttaggtagaacgacagtaagattgagagaggataaagctgtgtatttaaatgacattaattcgtctagaatgaaatatgatcctaagtctagagtttacaaaactgcaactacagggtacattgattcgaaaacaaagatgttccgtagacatttgactggtgaaggtttacaattagaacagttgtctagatttaaccgtaggtatgcacgtcaacaaggaattaacgatgcattacaagataaaaggaaaatcgagcatgtattaatagctaatccgactaaatatgaaaaattgatgagagaaactaagcaactacagcaacaacaaaagcaacaagagaattctacttccaaggcatcaatagattattcacaattggaagcccaaaaaattaaaggaaaaaaacaagattctttaacaaagaaagtattgaaaaccatgtatgaatgactaacactatcagatttatattaacaaagaatatatgcttcacttttgttatcgattattttttattttctttttttggtttttccaattaatttttaaaacaaaatgtccagaaaaaaaaaatattattaactaagtcttgcttatttttaaaggcattaaggaaaaattaccagaactttaacgataagacattaaacttttttttttttgtattagaaattaaaaaatcatcggtcgatgaaccagaacaatgtgatggaagtaaacttacagtcaaatcattagtcgatgcaatcaatcaatatcaatgaaagtttcacataactatttcctaagatataaagaaattcaaaaaccattgtttatcgacaaatatatggtgtataatatgaaacgtaaaagttcttcttgaaaaactagtgctcataaactctttcactatattaaccagttataaaatattcatcgagttctttatagtttttatacaatcatcaaatatgtatacattattttggataataaatgtcagagcaatcatatttgttcaaattatgaaattcttcgtggtttatatctacacttttaagatagttttattaaaagttgaatcgaaagttgaatattatcaaactgtaacaatgaaaatatctgttgatctatgtaaatcattaataaattgtggtatctttaaggtttgatgtcctttgcaactctgaggatattatacttcattttttttcttttttacgaaaaatgtttttaaataaaccctatacatgttgtttaggctttcctttcaaaagtataccaaccctaatacatttgtataacaaatcataaaaaattaattccggttttcatttttcctacagaagaaaaaaaaaataaaaaaaaaaaacataaaaaaaaatatttttttttatttaactttaatcgatgagataaggttaatcttcttagaaacagtaagcattttgtttaacttggtttattttgattacttcattaaataaatgactgtcggtcctaatcaatgttaaattaggtaaataaaaaaaaggtccaaaaatggaaacttcaacttttgtcaaacaactatcgtctgttaatagaccaattagggaaaaagcccttgaaaccttgagaacttttttactgtctgataaattcaaacgttccaaacaattgcagtttgacaaattatggaaaggtttatactatgcaatgtggtttagtgataaaccaagaccgcaacaacgtttagccaataaattaggagaattatttatcatatattttgatgataaggacaatgaaatcgagaaaaataatagtgataaagagatcactataaatgataaagcgtttattaagttcagtaaagcattttggaaaattttatgtatcgaatggtttaatatcgatcgttataggttggataagttccttttattaattagacgtgtctttttcaaccaaatcaagtatttacaattaaggcaatggaataaatcattagtagaaagatacattgaaaaagttcttaagagtatacctttgagtggtgataaaaaagtttacactggccttccattacatgtgatagatattttttttggatgaatgggaaagattatacactaatttcaatgaggaacttgatactgcagatgaaaaaaaagttagaaaatattgctgaatggaccaagaatacaccatttaaggattttttatctatattccaaggattgaaagatgaaactctcaccccaaaggcgattagaatcagaattaaagaagacttgttaccagataatagacttgtaacatggggagttatggacataaaaaataatgatgtaactgatagagaaggcgaagagaactcagaagacaaagacgaagaagagtggaacggtttctgaaataaaaggaatagatatataattatccattagcatttaatttcatctctttgcaatgcatttgtgcgttagtattttattcacataaatatatatatatatatatgtgtgtatgtgtgtatgtttatattaaatctattattttttaaatatatccgtttattgaaccagcaaagttagagaattcaaagtttcgtccccatacacaaatacacattatttgagcgactatatatataactcttatgctcattataattatcatattctttctctccatatacactttggtgtgccttgagggtaactgttttttttcttttttcatcttcgaagattcgccatgttcgaactgaaaagtttttgcctacagtatacaaaattttcgcaaaaaaaagaataaaaattgaaacaaacaaacgcaaaacagataaaattaatctctaatgtttaatattaatacgactttattattaggtttaaatttacttggtatacactactaatacattaaagactaggctaaagcaatcaaataacagatatagaccatatatctatttttcttccttttttcctttttttctgatatttttagtggatttcatataagttattaacaagaatggccggtgaaaagggtaatcaatctaacaactttttggaatctccagtcaagtttattcaagaaggcaacaactttttaagtaaatgtaagaagccaaacttaaaggaatacatgcaaattattagagccgttggtgttggctttgtagctgttggtatcattggttatgctatcaaattgatccacattccaattagatacattattgtttaaaataattcaatatgttatgaagtataaaagtctcttttttttttcctatgcaattatgcttattaatatatcttctactgtctcgactcctttagaattaaaaaaaaatagaatagaaatatttctttaatattctatattaacttccatcttcaattaccacaaattttaattaatacaaggaatataagtaagtaaataaggtagagatctatatatttctttattttttttgcatataagttatttactaaataaatgggtatgcttatgtattattacatattcaaatagattaaacaagttttttttctttcaaactttagcatatatatatatatacatgtgttgaaatctaattacggtttctttcaataatatattatattcagttatataaaaatgaaagcttatatatacataaaattactataataatttatttggtatcgttacaatgaagtataaataattagaaaaaggcaaatgacaaaaaagagaaaaataaatgaaaggaggaaagaaggataaactgaaaaatgtaataaatacgaaagatatctgtaagattcatttagaatgtttcacaattgtagcaaatctgtattatttgtcaaaaattggtaaatgctataataatttttgtattgttaacgttgcactctcctcttgttagcattagtttaagaaccagattcaattctatctctatgaaatagtaatattcatgatgctataatttaaaaataatcataccaatgtagtagatataagaaatgataaattgaaaaatattcatttttaacaagttagttgttaaagtaattacctataattgattcgtaacattaacttcatattttcttcaattttttatgtatactgtaatatgttgtaaacgcaatgcaaacatattcttctacaaactataatgtcagggataaaatatcaaactatcagaaatcaagaattgaaaatcaaaatattgataaaaataaattaataagagatgttccgttgaaatgtaacaacaaacgtctcttattaaccaaaatctgttcatttattcaaaaaataagatgtagatttaaatatagatcaattagaaaaaataacttagacgtaaaacccagtatgaatgtgttaattagcttatatggaaatattgatgaacataaaatttctgaaaaaatatccttgactgaaacagtggacgttggaaagatgatgaatttcgatacgttgcaggaaagtttgatagatatagacatgatattcaataatttgatatcaaaaatcgatcaatcaatgagttcacttcaaattgagaaaccagactcaaatttagatgactcactcgaaccatttgacttaaagcatgaccataatacattatcaacaataactacaattaacaattatctgccacaacttagtggtaataaaattactattttctctgattatgatttggattttgatcaacaattaatatctgattttagtgtattaagtaagttgattacaattatcttaccaccaccaaggtccagtaaaaggccaatcataaaagataatgagaacgctaaaaaattctattatgagaaaatcgaatttaaaaattttattgataagttaaagctaaaatttacaaatgtcattatacatgatgatagcagtaaaccttgctctaataatggtaaccgaaataatttatcaaattgtctagataaaaagaaagtaaatttttcacagaatatttcactttgtaaaacatatactgataatgaatatgatcggtcagatcctaatgttacctgtactcttcaagcattaaaaaatccagaatatgttcaatcactcaaatcagaaatcaatgaatttaaacacaaggagatgacagtccatgagggttcaatgttatttacacattttatttaattaccttttgtattcaaattgctccctatctatattatttatgcgtgtacatgtatattaaaccaaccttttatgaggataccctaaattaggtgctctttcaacacaaaaaactaatatatacagttattttataaaatatttagtcaaagaacaacatcttttttccattaggctaacattataatatataaattctcctttatttggttagaaagtcgtactgcctctacatatttgatgaaacgtagatttctctttatttttttaatttctgaagtttttttcatttttccttatttctcgaagcagtgcatgctacataatggctaaattggtagtataaagcaactacatgcaataattaaaacactcaactatgtagttagtaatctatgtgcacatgttattttggcttagtactcatataaactatatttatgagcaatttatagtatctcatctgtctaagtctctttacccccttctttaggcgaatcaaacaaaatggaacaaattaaaaacttttataacactattttaaaatcttcacatccaatattattagcgatacatttatcagggaaggctgctcccatattgttctatatattaggatcaatctttacaagttttacggtacaatttatcgtaattattttactcgtttcctttgacttctacattacaaagaatataagtggtagacggttagtccaattgcgttggtggtatgatgcaactaataaatccaattcaaattttgtatttgaatcatacaaacaatatgatcaatctttagctgtacttaatccaattgataacaaattattttggtggtctatgtacttaacacctataatctggtttattttcggtattatgtgtcttttaagattgaaattgttttccttcatcttggtcattgctgtgacatttttaacaggttgtaatacatatggtttcagattatgtgatagatgggaaccaaattccgaaaataataataataataatggttatgaaggatttactacatggttccaattacctaatattttagacaatttgtcaaatgtgggcagagttcaaacactgtttcaaaattttggcaatagaggaaataataacaattaatgataatattattcatttattttttcagatcgtatattcatatatacatatattagatgtgtaaaataaaaaatatatatttaaagataaaaagtaagatagcaattcatattaacatgtatacattactattaaattaacaatatcatattgaatgagactatgataataaaaaaacatatatatgccttagtgttacatatatgcaatattctgttagtatttatttcattttacttatatatttattatgcatatcaattttggattaagaattatcttcttttgtaaatacatggttttaatagccatttaccttcagcaacctcttttcttcttttttctaactcttctttagctgtttcaacttcaatgaacttttgtcttctttctagctttgcttttctttcatcgataatatcttgtggtggcttaaaaaattcaaatcttgtaaacattttattctcatcatcagttttcttatgaaaaaaccccattaattttagagtatttacaaactcatcgccctttccatccccaaatcttgatttgatttcagcaatccataattcacctcttggggcaagtattctataagcttcttcaatgaaatctaagaaatttgtacccattagtgaaaggcaaaatataacaatagtacatgaattatctggtaaggggacattcttaatatctgccactgtgatgctttcattaacctttttcaagtcaaaggagtagactttatgattgtattttttaaatgattttctatttttgttgaattttgcaaaatattggtcaatctttaatgctagtattgcttcaccacatcccatatcagcaataacaatttccttagaatttggtaaacctggtaacccacctggcgcattaattggtctttttgtcctatcaattatttgtttagtaaaaacatcaactggattttctggccatgttgttacttgagatctaaaaccatcatgatattcatcaaataattcaggttgttttttaataagagataatgcatcttccgaagaaattgtgtagagctgttcattaatccatctaaaacgggaccctgacaatttagccatcatcttctgttgtaagggagttaagtttttcatggctaaatttaaagcaggtttactgactctatttgaaccattcttcttattgtcaacgaaaggcttaactttagatgaaacttcatcatcatttccctctttcacctctaagtcttgtctgtttgctactatctcacctttatccacttttgccttcttctgttttgatttttgtttctttttggtcttatccttatccatattcttactttttatctgcttttcgaacaactgcagtttttttttagtgctagagtcttgaaatgcaatcttcttagtctttaaattccaatcacctgttttaaataactccatattggtctttttgtaaatctgttttcgtctatattctctttgttcttaattaaactcggtatttatcttttaataggtaattggtaaatacattacggtactagttgaagcatatcaagataatcaccatgtatatatatatcttcttttaactgatttcatttctacttttaggtagtcttcgaactaaaatatgaaaattttcatcaggataaaaaaaaaataagagaataaattcatttgatcttttagctcatcacaaaattattggactttttacatcaaagaagatacatatcaaaaaccaatctaaagagttaaaagaattgaatttaatctaacaaaaagatattcaccatatacagtataaaaatcaacaatctaaaaaattcatttaaccatcttgttttttttataaacaaaataatataaaaatatactaatttgtaagtccacatccagtttttacacaattgtgatatatttaggaaatattcactaaatcaaatcaattatattggtaatttatgtatatgttgttttctgtaaataccttgctgctactagtacagatcaattttggatgagatttaaatatatatgtatatatacaaaaataaatcattatctttaaattaaacatgtatttataatgacaaacaaattataccattgtcattaataaccaatgtgttttaaataatttttgtttcaaaaatttattattatttatggaaaagattgaacagacgggcaatcgtaaaatatagtaataagtgcgatattattattgctttctaagatcaaagactacttaatataattcactctttgattaaatctgatgcaaattataagtattgtgaaaacaaatccttagatcaaagataaaataatttccaaaagttatttaattttcctgataattctaaccataagcaggctttgactgttgagctctttaaagagattaaaaaaaatggaatagatttaacattcgttgctaagaatcttgcctatttatcgtattggctaataattatatttggacaatgttattactacacctatcattaacttttcattattactcatacttatacacaatattcgcatagtacctcgctatatacataaccattttatatattcctgtattcgagcaaaactttattccaaattatttgaataccacttaaaaggttcaatatactcttaaaataatgtatttataaccacaatttgagacaggattctcaagactaaataaatatatatatttaacaaatactaatttactatttaataaagcctcgttaatttcatgggtaatatgtgggttgaaaataattgatgaatctttacattcacaataacctattattaaccgttcacaaaaaaaaaagtataaagctctaccatcctgaaatataaagaaaatacatcaaaagtagaatccatgtatagatacttatatttatcactgataccatgatccacaaatttcaaaacatcaccttaatgccttaatataagataatatttgtatattatctaaacaagcatgtctataatttaaatatataattcttattgctatcatacatttaaacaccagaataaagcattttctacgtcagttcccatattcctgtcctcttttaaacaaaatagaatccaaatctccaatactaccacaattgcctatcaaataatttacatttcacaaaataaattatttaagagtttttcaaaataaaatggactagtgcgtacttatggtttgacacattttgatctaattcaaaataccaggcattgacatatggatcatctaatgttaagttatttaacactattttaaataaggacaatattgtttccacatctaatctgggtataattctttggaatgcatgacaaattatttcaaaatttattacatttattttgatgtgtaatcttaaccaagtgtgacacttcgaatcaataaatgataataattgcaaaaaaggttttaaatcacagctattaatattattaaaaaaagatagcaatcctatagcttcatacttcgataatacagtttgaaataatgtagatttaagcaaactggccgaaatttcattattttctcttttttcttttcttatttgcttctcacttaatatatattgctcgatcatatcattcaatccattaaatttgtataactcaacaactgaaatattttgggcatttggcactgaaagatgatagttgtaaagtgtggatagaaaactgaaatttatcatcttcatggtaattctattattactgttatatctattaataccaatattatttttataattggttttactgtgcttaacattattattactattatttttattatcaactttagaaaactcaataaaatcctctgtggaaatattaatgaaggaaatatttctattatttgattcgtatacattctgtccaaatttatctaattcaggtattaaaaaaatatcggttgatgaagatacatcttgtggttctaaatatggcgataaaatttccaaattttttttaataatattattattcaaactttcaataaaaatatgttgttgcaaattaccgctattattactatgtatgttatcaccgccatttttattattattattttcatttgtaattgaggtttttccaataatccaaatataattttgaaaacataatttatcattgattgctaacttccaaaactgaatctgatccaataaatcaaaattataatttacaattttatcgattcgaatagtttcattaaaaaaatcaacatttgacacttcgatataaatatttcttaaattctgtaaatttctattaataattgactcaagtaaatttctatttataataaatttgggtaagcataattcctgtttgttattcttagtatcattaaatgaattatcatcgattctaaaagcaacgtattctatattatgaaaatagttaaatcgataagatatgatattcccacatataaaaaatttgttaattggactattattccaaaataagaaatttttattaaacttataatacaagttattggccttgaaaatttcgaaagaatatgaccaaattttttgtatatcaatcaataaacaatgtggtttatagttatatagtttattttgtgtaaataataatggaatgtaaagattccaattatgagttctgtcataataaattacattttgttgtgaatccatttgatagaaaataatacaataaatacggtatattctttacttttcgttttttctttttcttttttttttttttaaaaaaatgatataacgaatacaggatagtttataatagcttatagtttgcaattctctttctctcttattttctttgtctatctttcttttgttatttctaaatcacatgacttaattttttttgatgagtatagcaaaattaaactatatgattctgatcaaatttttctttttttagaattatcaaatatccataatcaacagttaatttattatccaagttcttgtaaaaatgttttttcaagtattctgtaaacagtattattacaataatcacaatgacaataatagtagtaataacaataattaaaataataaaaaaaaagtcaaaagtattaaaaatacacaaatttttttaaaaataccaaaaaaagaagtattacccggaattaatggttatggatctgaaacaatagtgtcgttgctcattgtgtatttcatgcacgtggctttttttggaactcctgtttaagtaaaaaagaaacgtaaagcaaaacattctctttgggaaatacattccatatttagaaaatcttatcataagaacaagaattttcgaatagaaaagataatttgaatcttctgtaagagttcagtccactcaccatgtgttctgtatatcttctttcattttaatctttttatcaaaataacaaaaaaacaagggtgttgttctcaattacctgatttatttgccacatactttagactaattaacacttaaaagaaagagaaagctaagaatttgaaatatgaacaggaaaaacatttgtttttaatactcttcatactatgtatatgctaatatgtcgaaacatgtatgatgctgaattgttcatttgaatttcctcataccctcaaaatgtaacataaatactgatcagacacaattgcttctcactattttcaaaaaaataacatgtagttgttttaccaataggatgttctgtaaaaatacaaaaaaaagaggataacatatggcacagggagaaagatacaagtgataaaatcgttttgcaggtttcatcaaactaattaaatattgactagtttaataaactctgtaaattgtttcaatatcaacggaatgggaaaaaaaaggaaaagatgcgaagcaaatagtaagcaagccgtctgtaacaacatagtgtgtatctgaatgttaccttttttaaaaaaaagttaacagccgatttcgttaaatatatcatataatgtataggatagttttatgtagtccagtaataagtaaaataaaatattgttggtacagaagtagtaaaacagtaatgcgaaaaaataagggaaaaacaaaaaaaaaaataagatttttacagatcttctatcgcattcccttttttttcccttcccccctttttttttcttttttacgaaattataattttccgtagtaaaaacaagcccgattgtaatccactttaggaaataaaaaaagactttatcgtaattcatgatgatctttttgttctttttagtttttctcctcagttgttttaaccctgaggtataatttaactcccctcccttttccctcattttatttacaaatatattatatgagatattagccctaataaaaaaacgtggatgaaaaagactatatacatttttacaactaaacaatgtgctaaaataggatcagttgtaatatcgtaatcatacttttatcaacaattttaaaactgaatattaaaactagatgctttcttgttttttttaaaacctggtattactattaagacggatgagaaaaaagttttttagtgtagttttgataataaaaaaatgtaaaatttttccagataaaagatatttgtccaaatgaaagcggtttagtaattgatttgtaaaggaatatctccattttgctgtttcctattgtcctgccttaatggctcctcttttgatcatcaaaatgtgattttttttccttttggacatctccaaaaaaaaattgccaaaacaatagcactattgtgtactattgaaaataataaacaatacatcgcgcaaaatttttcttttaggaatttataaactgtctcgagagatcttgcttatgcagaaaaaggattacatttaacatttctttaaggataaacaatcataatggagacacctttgtttctgtcaaagttcactgtatttttcacttttgggttcttgagaatattttttaacacattcattcttttctgttacttatttcttggtattattttaatatggttactttgtttacatcactttaaacctcttctgtcaagtggcaaactacatcaaggtgacataaatacgtacatacatacacatacacatagacacagacacggacacagacacagacgcatatataaatacaaatatatatatatatatatatatatattaattaattaatttattgtatcccaatagttgttttttacgttttctcaataaattaatgcgcttcccccaagaacttcaaaacccacatcaaggacagcaggctgctccaccccttccaccagatattcccaatttaactaccaattatcagcatgatatattgtactactcacaacatcagttacaaaatcaacctactctttcgcaagctcatttgaatcaatatcttgatactacaagatacatcgataccaatactacttctacttctacggataataattcgaataacagcagcataagtagtgggaaaaacaagaataacaatccaagtaatattctcaaaaatgatatggtttcccttaataatattattaaagaaacaggaaattcatttgtaagtgaatcgttaatgaataatccattattaagcaaaaataaccaagctatactatcacacataaatttgaatcaattgcccgcaaatcccgatagcatacatggcagtgatcaaataccacaggtatctatatcacaaataaattctacgacaagtcgtaaaagtaaaaatactaacaataattgtgattctaatggtccaaagaacagtaatattacacatataaacaataataacaccgcaagtactgcatcaagtatttctaattcaactttatcacatttacattctggtaatcatgataaaataaatacgtgtaacaatagcaatacatctaattcatccaatgcctctaatatatcgtcaactaatacaaatgtagatagctccaatctctcaacaacaacaataccgaatggtgaattagtaaagcctccacaaatgaacaatcctgaaattaagaaagaatataatatgcgtgaaattccccaacatacaaaaagtatgtattataatttgatgaataacaatcctcatgttatcaatgacccttccattcaggagtctttatctccatattttcaaccattcggcgttgatgtatcacatttgccaatgacaaacccacccatatttcaaacttctctacctttatacgatgagcctgttggaagaaggagaatttcaatttccaatggtcaaatttctcaattgggtgaagatattgaaactgtagagaatttatataacacacaacctccaccaatgccttcaaagggtagcattagttcatcacatcctgtgatagatgatactgtaaggaaacaacaaatttcagtgcaagtagcccgagctattcataaagatatgttaaaatcttctccatcaaacattactcccagaaatgaactatcacacccatctacacaaacacaacctcctgttcaaatccaatctggacctcaacaggaaggatggtcacaaaatgcatcaccaggcaatttcgtccctccaaatacaatgcaatcacaatatgcattacttgttggacaagaacaatccatacctccacataaccaacttaatgacatcaatcctatgacgaatccttcattaatggtacatcagcagttacctttaagcttcaatcaacaaaatttaccgttacaaacacaacctcatataaatcaacagcatgcaactttatcacaacgtaatatttctaatatggtaaataacagtattaatagtaatgccaaaacaatgacacctagtccctatatgaaacaagaaactatttcaccaaatactattccagacaattctattgggaagtcaccacctccaaatgatgtaaaatttcctggcactgaagcttggaaaagggcacgtctattagaaagaaatagaattgctgcttcaaaatgtcgacaaaggaaaaaaattgcacaattacaattacagaaggattttgataatctttcaagggaaaatattgttataaagaaaaagttaaaatattacgaaaagcttataactaaatttagaaaattcactgaatcacatttccaaaactgccataaatcagatggattaaatgatttaaaaatgattgaggatatgttaatgattgaccaagatatccatgagcttgatgacaataattctgtgatcgggttaactgatgcttcttatatgaaataattaatatccattgttattttttgtttgttttgttctatgatgtttttttttttcaagcgttgtttcccattctttttttaaaataaaaatatatagataaatcacaatttcatatacttttatagcataagaatacataaattcttttcaaattaatcattgattctaattatagtcaataaaaaaaaccgtcaccttataaataagattgaaaaaatgaaatcccttggagaaattaacaattaaaaaaaggtcaaacaagaaaacaatatcttctattttcccaataaatttcatattttttttgatcaaactgttatctttagggccttgtcaaacaagaattaaatataccttaattttaataggtcgtaacaaaattttaaaaacttctctttacaagtacattttgcaaggtttttatatgaaaaactttgatagaactttgctaatggcagtgtatttccccaaaccctaaacctatatatgctccttattcttttctttgtcttttattaattaaaatacaaagtcagtatttcttacaaaggtatatataaatatataaacacatatttcttacatatttatgactaaaaggtctaaatttttttatttatcacacacattaattcattctttcatcattgtcattagcattttcaaccgtctctattttatgtaattgtttttcttgttctgcaattggagcgaaccatgggtgacccatagcctccttagctgttaatctttcttggtggtcatatctcaacaaattatcaattaaatcaataatttcttcattatcggaaagatgcctattattttcattaataaatctataccatggttttctaatataatgatccatatcatgaaattcccttggtagtacaatttcatacttatttaaatatttttcaaaatcttcactacctaacactctcacaattttaaccaattgatccgtgttactgttaccatggaagaatggctctttttgaaatatcatagaagctaacatagtaccaaacgaccacatatctaaagagtaatcatacattctataatcaactagtaactcaggacctttaaaaaatcttgatgctactctcacattatattccatattaacatgataaaattctgctaagccccaatcaattaatcttaattttctttgtttatggtcaatcatcacattatgtggtttaacatcacgatgcataatccccatcgaatgacaataatccaacgcctttaataattcaaacatatagtatctcatgtccatagcagtcaatttaggataaagtactctaaaatcataattattaatatattcaaagactaatgcaggtgtacgtgaaacaggatccttgactatatctaataattggatgatattttcatggccattatgtggtaaatcataaatatatggtcttatctgttttatggcatattcctttctatttgtgtaataattatctttattaaaagctaaagttgttggtggtattgcttcgtttgacaaattacttaaaattttaatttctctcttaatcttttttttcttaactggtttcagcatttttataacaattttacttccagttttcatctgaacaccttgaaacacttcagaatatttaccccgccctactttagtctcaatttcatagtcctttaaattgtcagtggaccattcaataatagtattttcataatcccaatattcttgatctctttgcttgtttacatttgtgtaaactctagattctgaccaaattctacttttcatggtgtcgatggaaacataaatctgaaaaaaaaaatagtagtgtttccttggtttagctcagttgtgttctaagattgatttattatgtcttcctacaattgcaactaatgggagggaaagaataatatgaagttcaggaaactaaggaagtgggataaaaatagtagacttgatagtagttaattattatttgtaaatataaatatgagttatgatatttcaattaacgccgttcagctctcgaagtcgactgagtaaacctctctatttccattgaaccattcacatcaactttaatatatttttttccctatttgcattcaagaaaatataaaaattttttttttctttctctgtctctttttgcctttacttcgaagaaaaagagcggaaaatggcggaaaaaaagaacaatataccaagataaagccttgtaaacccgtaaaacggaattggcaaaatcctccaagaatttttgaacaattccttaacaatataatgtgtatattatactcttttatagtgccagttaatattatactggttaaacgtacaaatgtgcgtacatttgcatatgtgaatatattcaacaaataaaagagaaaaagaatcaataaattcaattctatagattcaattgttctaaaagttttttcttacgccgttctactaaccacgattccaattcctcttgagtggtaacattttgggctaaagtaaaagttgatgtcttacctatactttctaatccattaggtacatggttaatatcctttattatgggtgtccaatatctttcaaatttttccaattgtggtatcagttgtgttgacgtcttcaaatattttttgttattccaattaatctttttaacatcgatccacctttccaactgaagtcttttctttgattgtttatctaaatgatctttaatttcaggtaattctatagctcttccgtagtaccatttacccagaattaatttcccatttttcaattgtgtatacagtcttagattatcaccagaagttcttccatgcaaattattctttatatgccaatcccacatctttaattgtttaacccatgtattcaactgttcattatattcttgtaatttatcttgccccaagagtggatcgaacattttgttatgacgatcaataatatcctgaatcaaacttcttctccattgtaatgctacatttaatattttaacatttgatatttgtctatgagtatgtggcctctttttattatttttttttgttttcacatcattaaaattttgttccatcttgatatattgcttgaatttatagaaagttaatctaatattttagcaaatgcatttatctctatatatatctatacatgcatatatgctgttctataggtgtctttcttcttcttcttcttcttcttctttttttattttttttcatctgatatatgctatttttattaatttaactattattttctttctataatattctggatttaaatttgcatgggctatcttctttttctttttctttttcctttataatagtaacataaatctttatactgctaaaaggaaacccagagaggagcaaaaacagaagattgatagaaaatacaatacagcaaaaatacaatcaggagataccaacaatattccaagatacaagacacctccctagatgatatgattatttctaatatttgataaataaaaagaacaacaacaacaacactatattggtgattaacatgacaaaaactaccaataaattaaactaaatctatacatgattatgactattacattatattatgtctttcaaaatgcatctacccttatgaactagaaaataactaatcttgaaccatttcaatttttgtttggatcaaaatccgccggaatgtgtggctgctgttcatcactgacctctgtttcaaccacatcactatcgtcaccattgtcagaccaatcaaccacaatcttatctcgatgattattgcctaagactgtataatctatgttcaataatatggaatcacgttcttgttcccattcatctctcatgtcttcaaacccaatgtcccaaatacggtcatagaattctttaatcttattttcttgtatttttctcttttcttcttcagccatccatgccatatgtttcaaatcttctgttgaaggttcatagatatgccagatcacataatggggtaatcctacaacatcatatcccattcttcttgacaatttgccaaaggcttctgtttccgcatgtttttcaaaagaaaatgctgggaagtgtgatccacttctaaataccttagcctttgacaaaatagaaacaccaccaattccatcaagatgcatttccacttcaggatcgccattagggtctctcatataagccaaatgtggtctccaagtggcaaactctggataaccttccacgatcactgcatcttcatccaagacatctgccagttctaaacccgcatcagattcttgccatgaatttaagtcatatggttgaatatttcctaaccaatctggtaagggtctccaaacattagggactataatatctttatcatgatgcatcaaatcctccataatagttttcggaatagtttccacgtctacatccctccagtaaacccaagagtgataaggtttgatagcaacagaacccaaccaattacgtgctcttgccatcaatttacgacgaggcccttgtgcggcaaacccgtgtctatcactaaatgattgacctataatttgaccaaaatctttttcaaaaatttcaatattaccgaatcttaaaaatttattctcttgtgattgtatttgttgtaaatgtgttaaaagaacattcatggtgtcatcacttgaatctgatactaaaaatgatagatcaataagattgtgtggatatgtcatttcacttaaatgtttaaaaaatcttggtaaatgttcagctgcatctcttagtggaacacaaaacagtattctatctttacgttgccaaccatttgcatgaccaacatagttacttaaatcataaaattctacaccaggaatattattaaaatttggaacatatcgtttatttgattgatggaaaataatattctttaataggccatatattagtccccatggagtcagcatggacataccgtataaccaaataaggagtccccataaaataactataacaataccaatgaatacccagtagaagggtcctaatttattccttactctataattgattccaaacattatataggtattttgcttaaatgggttgggtaaacaccaaagtagtaaaaagtcgatagacgggtccaacactcttgttgttggttatcgaatgacgttaaacgtgtgactcaacagcagtacaatgctacttagcactctccttcttccacctcctcctcccaagtaataatagtggacaaacttggatcgagagttccaatcacaacattaaaatactataatgcagacaaactatgcctttttgcagtcaaaaaataaaaaaacaaagcagaacaaaaacaaaaaaaaaaattaaagaaattctctaaaattacagtcagaaaccctaaaacaaaaaaccagggcattttaccgtttcaaatgatattaatggcaccaccacttgtttttttttttattttttctgtcttatgaaaaacagaaaaaataaaaaaaaaaataaaaggcaaagccataaacatgtaatcttgtaaaaagaactacacatgctttcagatctgattctgaacttttactgcaattaaactgattttcgattcttatatagatttgtctttttataatcctattttactaaatcccttttgaattgtttattgaaagaacaagaaaacaaaaagaaagacacaagatacacataatcaacaataacctatagtaaataatgtctgacgaagaacacaatttcgaatctgctgatgccggtgcttctgctacctacccaatgcaatgttctgctctaagaaagaatggtttcgttgttattaagggtagaccatgtaagattgttgatatgtctacttctaagactggtaagcacggtcacgctaaagtccacttagttgctttagacattttcactggtaaaaaattagaagatttatccccatctactcacaacatggaagtccctgttgttaagagaactgaatatcaattattagatattgatgatggttacttatctttaatgaccaacgatggtgaaaccaaggacgatgttaaagctccagaaggtgaattaggtgaacaattacaaactgctttcgatgaagggaaagacttaatggttaccatcattactgccatgggtgaagaagccgctatttctttcaaggaagctgctggtaactaaaataacaaaagacaagaagatggtttaactaaaaaaaaaaagaaatattgaaaatagatttttatttaaccattttgttttatatatatctgatctttattgttcttataattatttgatctttactagtcattgaattatgtataaataatgcatgttttcataaatgtaaaagtataaataaataaatatatttatatatatagtgtatatttatatattttatatctccacattgatataaaaattgacatgcttaatttttacaaaggcttttcccacctataaactttcaaaccatcagttgtgtttaacagcttgatatctgaccgttgctcaaccagcctgtctaatattgtctcagcttccttaagcccgattggattgttaccatcatataaggaatctacaatcatggtagttaacatggttactgtataaggttctgcaacatgtaaacttttcaaaatatttaatacttgtcttgtcttggtcgttaagaatttgtcatagatcttgtcttgtttatctctttcccataaagcggaattttctttcatcttaatcctttgtaaaagattttcctgtgtatcgaatggtttttccttaaatttaaaatagcttaacttagaatcatgagtattattattattattgttcatactattattcaaatattttccctttttaaaaggaacagccagtttccgctgcattaaaggattcgtagtggtatcctgaactggtatttgtcttttacgtaattggaagacgggtatttcagctataatattaccagtatcatctgaatcatgatcttccaaccatttcattgcattcttataaaaagtcaactttctggattcattaaccatagaaattagattgtttcgtttagggaccacaatgaccaaatcatcttcatcaacaagactataatccaattcataacagtgaggccatagtgtcatcatttttaagaaagtttgaatagtaatcttattaccttgtaccattctgttgagctgtggcaatatatattttgttatagaagggtttccctcgccatttacaggtttttgaatggaatagagagataggatagtctcgcaagaattgaaaagtttgatcaggtccttgacttctttacttagttttaatttatttgcttcccttacatagaattttgaaccgatgtatggatactgctgtatctgttcttgaataaaatctttcattgcaattggatcactgaaaggtttgtatgtggtcagataaattggacacagtccgggattaatctgaattggggtagttgtatgtaagccgttagacaacttttgaagagaggctgcagtatgtaccaagagacagtcaggttcgtttatggttatccagacgttgtcctcaacacttgaagttgcaggtttaattttgatgcctgtggcgagagggaacataagtaagagtccagaagaattgactgaaatccaatcgtagctattattgttatcaatgatatcatctatgtaatattgatcattattggaatcagtactgccgacataacgggttaacattgaagatagttcgatatctacatcagcagggttcttgtcaaaacaatgtattgcaacctcagtgaaaaattgtccaatagaccaaaggtgattcataatacgttgacaattaacatttttgggaacggatggatttatatttgaatcattgacatactgctccacccaaagacttggattattgtcagagtcggtatcatttgattcattatccttatatattgggataagaccagtgaaatcattattatcaaatggtttcaaaccgttggtaatttgattagatgattttaagttatttattagtctttgcaaagacttgaagttggcatagtttttcaataaaaaggtgtcataattcgataagatttgtttaactatcggtaacagttcagtttcacctgaaatctgatctaaatcaataattggtagcatttgtcaaggaggggaataaataagtctttccttattgagccaagtgaagttcaaaagaagaagagagagaaaagaaagaaaaaaaaaataaaaatgaaaataaaaagacaagaacaagtatgagagttttccatttgcttatttgtttatttatttatttagtcatctagtcattcagtcaattaatgcattttacgggagtagagtgacagaagattagattaaaacaagacaagttaatgtaattaatatctgttagaaaaatttgttcgtgtaatcaagtgaatttgcagggcatcgaagatctatcttctcttgtgagaaaataaagaaaacgaaaaaaaatatggaaacaaagtaaacaaaataaacaaaagatgtacttaattgaacataaaatccaaacatccaaacacctctccatatgtcactacaaacgaaatagtccaagacagattgagtcacgatatcaaagatcatcaccgacggaaaaatgggaaaaccacaggaaaaatcagcagaatgaaaaaacaaaaaagcaaaacaaacaaaacaaacaaaaccaaaatccgtcgtccatccatacaccacactgctaatctttcacacaatctcttatttttctttatacttcttttcttttggtggaagataatagaatggaaaagaatcttgcagaaagaaaaagaaaaagaaaaagaaataaaataaaaaaaagggggggaggggaataggaggacgagaggggtgaaaggaaaaaagaaaagttgtcttttttccttttttttctttttttttttttctttttttttaattttgcttctgtggaacaattttgtggaggcaagaatgaaatggagttgaattttggattttggatttggaaggttaaagtttcgatttttattttctttgtggaaaaacaaaaaggaggaagtatataaagagaagagagaaggaagaatatgtcccgcatgctggcgccgttctccgtacttctcgctattgctcgaacgcacgtactgcatacacatatactcccctcttctcttcagctggatcgattgttcactagtatcacttgcagataaatccaccttatcttcttataaactactcgcccgtttctattcttcctcagaataaaagaaagagagaaagaaagaaaaaaaaaacattataaacagacaaactcgtgtatataaaacccttttaatacccagtcgcattcgatatcacattttttttgtacatattaataacatctttgttttttgctttcttcctttatctgtaacatcagtatcgatcgttttattttgttgtttttccttttttttttaaaaagaataaataaataaataaatattattataatatagaagatttttctcatcatgttatccctattagctaaaaacaagaattctgctaggccattatttaactctttatccagcactgctgctcgtttgcaatccactaaagttcaaggtgcagttattggtatcgatttgggtactactaactctgcggtggccgtcatggaaggtaagattccacgtattattgaaaacgccgaaggtgcccgtactacaccatcggtcgtcgctttcactaaagaaggcgaaagattggtcggtattccagctaagagacaagcagttgttaacccagaaaatactttatttgccacaaagagattaattggtcgtcgttgggaggacgctgaagtccaacgtgatatcaaacaagtcccttacaaaattgtcaagcactctaatggtgatgcctgggtcgaagctagaggtcaatcttattccccagctcaaatcggtgggtttattttaaataaaatgaaggaaactgcagaatcttatctaggtaagtcagttaaaaatgcagttgtcactgtgccagcctatttcaacgactcccaaagacaagccacaaaggatgctggtcaaatcgtcggtttaaacgttttgcgtgttgtcaatgaaccaactgctgccgctttggcctatggtttagagaaagctgactctaaggtcgttgctgtcttcgatttaggtggtggtactttcgatatttccatcttagatatcgataatggtgtctttgaagttaaatctaccaatggtgacacccaccttggtggtgaagatttcgatattgtcttgttaagagaaatcgttaagaaattcaaagctgaatctggcattgatttagaaaacgatcgtatggctattcaaagaatcagagaagccgctgaaaaggctaagattgaattatcttccaccgtttccactgaaattaacttacctttcatcactgctgatgcttctggtccaaaacatattaacttgaaatacaccagagctcaatttgagactcttactgaaccattaatcaagagaactattgaacccgttaaaaaggctttgaaagatgctaacttatctacctccgacatctctgacgttcttttagtcggtggtatgtctagaatgccaaaggtcgttgaaactgttaagagtttattcggtaaagaaccatccaaggctgtcaacccagatgaagccgttgccattggtgctgctattcaaggtgctgttctttctggtgaagtcactgatgttttgttgttagatgtcactccattatctcttggtattgagactcttggtggtgtctttaccagattaattccaagaaacactaccatcccaaccaagaagtctcaaatcttctccactgccgctgctggtcaaacctctgttgaaattagagtcttccaaggtgaaagagaattagttagagacaacaagttgatcggtaacttcaacttatctggtattccacctgctccaaagggtgttcctcaaattgaagtcactttcgatattgatgcagatggtattatcaacgtttctgcccgtgacaaggcctccaataaggatgcatctattactgttgctggttcttctgggttatctgaggccgaaattgaacaaatggtcaacgatgctgaaaagttcaaggcacaagatgaagaaagaaagaaggctatcgaaactgctaatagagcagatcaattaaccaatgatactgaagcttccttgaaggaattcgaaggcaagattgataaggctgaagctcaaaaggttaaggaccaaatcgcttccttaagagaattagttgctaaggttcaatctggtgaagaggttgctgttgatgaattgaagactaagactgaagaattacaaaatgcttctatgaaattgtttgaacaaatgtacaaaaacaactctactaatgaaggtcaatctaatgaaaacaaacaataatgctataagtgaacataatattaatgttagtaaccttttccttttttgtttttttcttcttttcacttcccctgttttttagtgatttagtttcattttaatagagtaatatcttcataatatgtcatatgtgttatgttattagctgctttcatttgtttatatttaataaatgttatttgctttctacatgcactcatgagtaatttttttttctttcctttttttctgggtttcctgtatttaaattatgtaaatattgttaattaataactataaacaatttggataaattttaactcttaaatttactagtttatgatttgaacaatttcgaagatctattaatcaagagggaatttgcatgaaacatgcattctttatgtatgcataagactgttttataccattgattcgttttttttttcttttctttagaagaatgtgtatacgatatatagtaacatggatcccattcaaggttgaatagtcaatccttattaaaaggcgggttctgcggaaagtttattccgcatccagctagtgcttttttatttgctttatttttttttttttttaattggaattttgacacttggacctctttttgtttcttaaaattcaatattctatcaaaaaggcgcaatagaagtagtatacacacacacacatatatatatatataaatacaaagtagaataaatataatatagtggtctatcaatacagtattataataattaaaagacactattaacaatttgaactaaatcttttttatttttttttttgattatgcaattaagagtatcacctttaactaagattatatcactttcagggtttttggctttaggatttcttttagtgattttatcctgtgccttatttcacaattattatccattatacgatatagtaattttcctattagcacctataccaaattcattatttaaaaacaggtcagactatggttcaggctcgtttatgaacgatccacttgacggttccctaggacaaacagcctcagaattaggttatttttgcaccgggatgcttgtcactagtgggataacgctacctttggtgttctatcactgtcagttaattaattcagttagttgtgtaatgagtatcagcggtggtttaatcatatattcgagtattgttatcttttcctggtttttccattcaagctggaatgatgatgattcgaacaatgctttatttacatgaaatgaaactatatatatatatatatatatatatatgtatatgtatatgtgaatacatctgtgtatgtatttggggaatcctttttccttttccccttctcaagcattaatatatgaatataactataatatttctttctttggggtgtcgacagtgcgatttgatagcgtcaacagagaagtgcaatctgtaaattctttccgtttgtttttttttggtgtttttttatattccattttatttttcgcgtttgaactattcaccgaaactttttattgagtgcattacttacttttgttttatttgtaacatttttggttctacagattattgaaattaaatatgaacaaagtttgatttaataatgccaacttttattccctttcttatttattcacttctgcttttaagtcgttattatcattgagatgtttaaatttagtttactattaaaaaagaaaagaagaaaggaacaaaaaaaatcacaaatattaggaccttacctatatgtgtagatatatttcaaaagagtaagaaaaggacaggaagaataaagttataggaattttaaatacaatgtcaacgtctaaagttattgaatatattaatgataaattacatagaagatgtcagcctattgtatttacagacttaatgaataaatttcacattgggccatctgacgcaaaacaaacaatgtataattattataaagagacaactacgatgaaattcaattgtataatcatgatatgttataaagatggtacaataaaaatggctaccgacctaaatgaaacagaaacacagagctcaaataacatactggattgttttatctatgcattcaacccaaataaagagtttacaccggtttatgagttaaacgatcaatgtggttcaaatttaatagttaatccatataagttggttattgaggatgagaagagggtggaatctgttggttctccaatcaaaagatcccagacggattccaaagtgagtaatgttaaaaaagatattgtatttaatcctgttagatctaagacggatagtgctgttaatagtaagagcaatagcagtgataagaacacaagtaaaaaaaacgagccagctaaacctaagaaatcaataggattgaaatccacggaaatattggctaaaatgagaaaagctagggatgaaaaagaagctgaaagacaaaggcaattgaaacaaagaaagcaagaagaagaggctaataaactgaaaagactgaataatgatccaacaagaaaggcacaaatggaggatcttaataagttatttgttgatagtgatgaggacgacgttgtagatgttgacatgaacaataataaaaatacaaatgagagtaataaaaaatctgaaattgaggactcagatgttgctactactaccacatcaacaataaagatgaataaaacgatagatggtagtaaattagaaagtttgccagacaccacagtagaggattcgcttctagagattgagagagatgagccaagtaataataaacaaaataatgaggcggtagatccaagatccaagatcgaatcaataaatccctcagaaacttcagaagctgaaaacaaagaacaggcaaagaaggagccacttggagaggaatctattgaggaaattgttacatcatatgtagatgaggatggttatattgttacaaatagaaaaagaccgcagcctataagcaccaatagtgacaatagtaagaggagtattggacaatcaagtagtccaaagaaagtaacttctagggccaagtcaatattagctaactttggaaatgcatctaagaagagttcactaccacccagaaaaaaagttaaacaaggttctattgaaagtttcttcaaaaggtcatgatatatttggatattactaaagagagaattaaaataaaataatcatatcattttagtcttttttgttttgttttatgttaattctcttttctcttttcttagatattaaattatagaatacacacacctttatataattagataatgtgatacgatcaagaacccatgacaagtaatcactttatgttcactcatacttccgtttacagcacagcacacgaacttttcatttttatacttaaagtgtttacatctacatgggcctatatcgtatgaaataacatttcatacaaagattgaaaatttcgaaaggagtgtgaattcctgcattgctatttaattttttttttctttttctaattgcattttgaaaaataaataaagtgattaaaggaaagataaagaaagagaattaattaacagtgacatgagaaccatagacttcaaaagagagacaagcaggtggaaactatatactactatttttcagctcagtctatacattttttacaaaagcaataaatataactgaattaaacaaaaagaatttaataggaatcgctgactctcctttatacctatatatatataatactccacagataagactaataatataagatgactgatttatgcccagtttatgctccattttttggtgcccttggttgtgctgcctccattatttttacctcatttggtgctgcctatggtactgctaaatccggtgttggtgtttgtgtcacatgtgttttaagaccagatcttctaattaagagtattgtccctgttgttatggctggtattattgcaatttatgggctagttgtctctgttcttgttgtttattcattgggtcaaaaacaagctttatacaccgggtttattcagttgggtgcaggtctatctgttgggctaagtgggttggctgcgggttttgctattggtattgttggtgatgctggtgttagaggtactgctcaacaaccaagattattcgttggtatgattttgatcttgattttctctgaagttttgggtctttatgggttaattgttgcattactattgaattcaagagctactcaagatgtcatctgttaaaaatataaaaatataatacataatagaaaataaatattatagctttattttctcttcgtttttttatgtttaactgaaactttatatattatatacatataagatgttgtatgtattacctttattattcatttgtaattatttctcaatatctgttttgtcaattaatgtctaaatacatttatatctatatagatatgtaggatcaacaatacttaagaaaaccttttaataatgaattgtaaaatagaccagattctttcattcaactcttcattatagtgatattttgcaccaaatctttctttgaacaatgttctttgaaacctgatgatatctttagaagttattataccttttaacaacccatgatcctcaataataatactcttacatccattgtctttaaacatatgaaacagtaccaatgtagatgtatcgagtttagcagttaaaggtgaggaattaacaatgtcacaaaaacttatttcatttatgttaacattcatatgattattagtattgttttttcttgaattaaatctttcaatattaaaatgaactaatgtccttgatgcattactactatttatatcctgcatcattaatttttgcactaaatgtcttcttaaaacgtagccaacacattccatatctggatcagttgtatcactgttgatcacaattgggaacccatttactatcttatcatttgattcgtatattattttttcgatttctgagatatacatggtctcacttaatacaataagatctttggacataacatctccagctttgtatgaggataaaagtgcctcaccctttttgagctcttcatcttccatctctaacaacggaaatccattaactataatcatttgatcggcaattcccactgttccagacattgataatattatccttgaaattgcaacaactatcatagttggaataatatatataaaagctccagtcaattctagcatgattaccacaacagttaatgttaagtttgtgataccacataatgtggcagccgcgccaaggaatgcatatgcaccagaggtgattatacctgctccagtgatatatctttccactaatagacttatagctcttccaaaagtagcaccaactgccatagatggtacaaagatgcctgcgggtacttttgcaccatatgaaataattactaatgcggccctaacaaaagtagcatatattaaagaaaaaaacatttttaagaatccaaacatttcagtatgttcatccaaataacacagtttatgactaaatacggaattattaccattatcctgttttgcatctccagagacacattcatggaaaagtacacccatgctttcggtcatatccaattttaaaaattcattgaaatacgataacaaagctgtaattaatgctaggatcacaatttcttgagtagtccatttagacaaatatcttttacggaaattcacgtatgcaatgttcaatttacttacatattttccgtagagaccgccaaatataccgagtaaaataaagatagggatttcgcctgctctccaattcttatcgtatgtaacgttgaataagataatcttgccatttctaaatggattaatgcattttaatgtagtgactgcaattaacgctacataataagatttccataatgtttgggcgttaaaatcactagcagatgataattcttccaacccaaataaaacaccaccgataggagcaccaaaagcaacagcaacaccagccccgccaccagctattaaatattcaaattgagatgaatatgttaatgtatctttcagtagccatcttgtcacaataaatgcacaacatgttgcatagtgaacagagggaccttctttacccaaacttaagcctgctgaaattgctaaaggtaacgctacacttttcacaaacagtgtggtcatacttaagaactcatttttatattcaaatcctgagacccaaaccttaatttccgatattcctgaaccagttgccataggagccacatatttaactaataatgtactaatagtggcaaatgttacagataaaatgacaaatatcaaaaatggagaaatggcacctgaccactcaatccattctccttgatttgtacattcaatttcctgtctttttgtaagactattaaagaatgatcgattcgtaacagcttcttttaatgtttgaatattactacaacaaaaggatttatttaaaagaaagtttcttgaacaatggcctgttttccagtttactaaagtttcagtgaaaatttgtataaaccctgcaaaacaacctatcacaacagccactgtggttaatgtaataaaagttttacatttattccatatgattattttgtatttctcgaattttgaacttaattgatctctttcataatagtcattattttgattatatatatgattagattcaaaattattgaaatcacttcttgttaaataagaggacttcctattaagtcttactgagcctgttagaattggactgttcttttcagcaattttgtcaatcgtaatgaaatgatcgaaatttttagtttcagggatcactttcttaaaatctatctttgagaattcattaccatgatattggttatttattatttgagaatcgtcctggtaggtgtcatctgagtcttgaattgaaattagagagtatcctttagccataactactattggaatttgcaacactcttcaatttatgtagacagatgtgtcaaagcttaaatgtgttattagtacgtacaggattatacagcttccaaatagtttattttgtgttttgtcaagacagttgcagaggacgctctttattgttgttcatactgtaaatcatagttatttgttacaaggtcatctgcacaatcgactccaattcaactatgattgaaaccttttgttgtatatatatatatatatatttttttcctttagtaaatctaatagaaataagtaataataatatattttcaataatatagaaaaaattatctaagggaaaaaacaaaaaaatgaaaagacatccgatcacgtgaacatcacatgacctagtttacgctccacccagacaccaaaagcttagtatttcttaaatttgtcatttccgaccaccaacggaaactcagaggttgccgtcgttcggaatcaggcgggttaagatccgaacacggaaagggagacggaaatagaatctaaaaaaaaaataaagaaaataaaaaaaagaaaagaaaacttgaacccttctactaaaaagaaaaagtcacgtgctatgactttcgcttaaagatattttcctaaacaggaaatccaagtttggaaaaaaatatagaagtatttcttttttttttttttgttaaatacacataaaaaaaaattttctggaatagtttaaattcggaagatgaagctcatcactttttttttttaactttttatttattataactttggattggtttaaagcttttagttatacgttattctattcagtttggtcatattaactatgaggcgttgtttgtacacagttttgactcctaagtaaaagaaaccattcaagcgagctggttgacaagtgttattatcacttatacattatacacacatcacattttgcaaggaacttgaataacctattatttttccattttactatttttcaataaaccaaaaaggcaaaggaccaaattaaaaaaagttatattataatgtcttccactccaaatccaaaagctttcccattagctgatgctgctttaactcaacaaattttagatgttgttcaacaagctagtaatttaagacaattaaagaaaggtgctaacgaagccactaagactttgaatcgtggtatctctgaattcatcatcatggcagctgactgtgaaccaattgaaattcttttacatttaccattattatgtgaagataaaaatgttccatacgtttttgttccatccagagctgcattaggcagagcctgtggtgtttctagaccagttattgcagcctctatcaccactaatgatgcttctgctatcaagaaccaaatatatgctgttaaggataagattgaaactttattaatctaattggatcttatgtttgcatttctatctaattatttgtattattgacttctttaatatatgtatgtatatgtgaatgtatgtacctatctataaagaatattctaataacatttatctacctatattctttatgttatctgaattgtcattgtatttattgttttgtgtttttaataatatgtttcagaagttagactagtaaattttgtattctttaatataattttatcatttcataaatcagacaatattaaacgttggattacatgtatattaagtttgaaagaaagatttaattatcaaaaaaaaaaaagaaaagaaaagaagaaaagaagaaaagagagagagagagactatttgaagtaaatataataaagttaatattagcgatactattaataagacaatttctactagatactttctctaaattatcgatattcagattcatgctaggtataagtatgtgtcattggttattgaatcttttctgacatcatagataatctttattagtaggaagaagctatttctttttttggtttttaataaaattacaatagtttgaaattctactaatacatattcaatatgatgatcagacagatctaatttaattcagatttcagaaaatgtatatatggataacaaatatatttgggggggggaagttatcattgaaaccatggatattgtattgtttgttccagtgggataaaaatgggtattagactcgttattcttaagaatacattaatagtcattcttaaatgtttgaaggggggttcctcatattttgcaaggcgtagattaccaacagtacatacgataggatatcctatagtaagattctacggttaactttttcatcaattgattctttatctttaaaatatatctctatcttttggtttttaatagatggtaactctgcagaatcgcaaagaatttcccttcctgtaactttttttttatatttatatttaaaacaaagacaaaataaaataaaaaaaaaaaggggggagagttacaaacgaagagttatacaagaaaagttataaagatttggaagttggaggtagtggatagttgattctgtgctatcaattggagaataagagaatataaatttaaccattagagaagtgtttagaggttaattgcgtggggctaatatcaaagaataaacgtttctgttatttagtcttcttttctcttcgttacttctgctggttcttgtcacaaagtatactatggggttcctcttttccagaaggaagaaactcgataagtctatcccacagaatgttcataaaaattcattatcgtttattgaaaatgcggatggccctcctcaatcaacagaatttaaaatcaaggctaaaggtgaaggatcctgtaggaaacgcagtatctcgtgtttatgttgtgggtccaaagcgagtatcaatgatgattggaagaaatttagatgtttaatttgttgtacgacaaattatttgagtaatgaaaaacccttgatcttggaatcattaatgatacgatcttctcaatctcaatgttgttcattacaacaattgaagatcctgattaaacaatgttataagacaggtctgaaaacaagcactaacgctgaaaatattactgaggatgcattagtcccggattttgaacctatcaccgcatatctcttaagaagtttccatgatataaatattttagaaatgtcttttctaaatttaaatagtcccatagttattaatattgacgaactaaaggaattttactccttaataatgcacctacctacaagaaggccattttacaagatgctttgtgcatgtaatgatcttttgaaaagaccaacggtgaatataaagcggtatcgatggatattcattatttgggaaattccagccattcgaaattgtttaacttttaaaaatgattcgcttggatatgatacatttcgtattaagtctgtagcatatgaattagttaaacgttgtattggctatttgtctcatattttaaatcacacagatagtaataattatcaaatttttcttacgtatttaagatacttgccaaaggaattgtttttaaatcatatagagactattaatttatatttaacgtatcaattaactaagatatattcaaaggaagttacattcaataagaaaactaaaaatgacttcacaaattctactaataccaataataatgataataataataataactccatgatagggttgctgccactttcacaaccagataatccaacagttatccatacaaatgatagaccctttgctgacacaactgaacaagaaaatacttcaaatgcattagatgataaattattaaatatatatggcaggaagaaaaatgatcaaaaatatccaatgataaaaacttttaaatatcaaaataattggcatcttgaaacagcagctaacttgatgaaactttactatcttgtaaactataagagggtatctataaacagcaaacagatatatggaaataccaaattaaacattaattctttctataatataatgttggattttatagattataaagacgattttaataattgggaaggtttggaagttaagaaaaaacttgacgatatcattctaatagaagaagaacaacaaaagcaaagaagaaaatttactttttgtaagtattcatttttactatcattgggtgtcaaaatatctatcatggaatatgagacaagaaaaattatggaatatcatgctgaaatggcatttttggattcacttgataaaggtaagaatatctctgtatattttaaaatacgagttcgaagaaaccatattgtacaagattctttaaatgtaataaagggacatcaaggtgattttttaaaggcattaagaatagaatttataaatgaaaagggtgttgacgcggggggccttcgaaaggaatggtttatgttattgactaagaaattcttccataaaaattcaactttatttggaactgtatctgagagtaggtacacttggttcatagtttattctcccaattcaaaatccatacaaaataagaatttacttcattcttattttttgtttggagtcgtggttggactggcaatattcaatggtgttattctagatttaaaatttcctagattattttacaaaaaaatgtgcaatgaacaagttacttttgcagactatttagagttatatcctgaaacaggtaaaaatttgcaaaaattgttggattatgatagagaggattttgctgatgtgttttccttaacttttgaaacaaccattggggataaaaatcagttttgttccattgaattgtgtagtggtggatcgaaccgaattgtcactttaaagaataaacatgagtatgttcatttatggatggactattatttaaatgtgaatgttaacaaacaattcattcaatttatgaggggatttaataaagtgtttgatggatgtaattctataaaactatttaattcagaagaacttgaaaggttgttatgtggagatattcaagataaagcatatgattttgatgtgttaaggaccgtcacaaaatacaaagatggatatacgaataaaacaccggtaatagagtggttttgggagatcatatcaggttgggggattgaattgcaaagtaagctattacaatttgtaacagggtcagatagggttcctgctacaggtattaatactctttcctttagaattagtaaattaaatgaaaataatgatatatcgttgccagttgcccatacatgttttaatgaactttcacttccagaatacagcaataaaaaaacattagaaaataaaattgtaatggcaattacagaatgtcaaggttttgaatttcgttaaaggattaatataccgttaaaggtagtgaaaagttgaaaaaataaaactgctcttgatatagttttttgattatgaattataatatgtatatatatataatgctagatttaataatgatgtctatgattatgagagacaatatgcatgattttaatacataaatagtattctaataatgtgatctatgatgaaatgctacaaattctcttatctaaattcttcatttaaaatccatcccctcttctgcttatcaaaggttgcaattttgtttaatagagctcgtagtttgataacatcttctttttcattaatagatagttgtaagctagaaataattttggatgacggagcaaaaaacccattctgttgagacaaaaactctttaatctttgttaaaatattggtagaatatgttatttttgtatcttgttctaatatagtttcttttattgaattcttgacatgttgtttttgtatatttgaaaagatagagttagtttctattttattcttgcacatatttttatttttatttttaacaattttacctgctttaccaaattttcctgtccacgttggtgttccaatatcgtactttttagttgctctacgagactgtcttaaggctttcatagcctcgtcggctagtctttcagcttcttttgttatcaatctagaagattgaaaatgtgtattctctaatttttcttgtgtcattgcactctctaaagcttcatttccaccaagtaaaccttctataagacggtcatcctcatttttctttttatccttgagctcttttccattataaaaactctctaatttagatacacccattatttttgttaattcatccaaatcatcgctttcatgtgtcacagacttttttagagatttagtatgtttttcaatttcttgagtcatttcttctgtcgctaaaccttcatcaccaccaagtgtaaataaatcatgtagttcattcattttaaagaatcttttttgtcttggatcgcttaatattttatttgttaaaaattgtttgaaaatttgtctatgatagattttctcttcgattgttcctgacaccatcaacctatagattgacacttctctcttttgacctattctccaagctctttcacgagcttgcatatcagtggacggattccaatcagggtcgaagataataattctatttgcaccagttaaattcacaccaagtccaccaactctagttgttaataaaaatacatcataattttcattattaaactgatccactaaggtttgtctttttgaaattggagttgtaccatccattctgagatatttaatgttcaaaagagcatcatcgagaactgatataaatttctcaagtatatctaacatttgtcttgattgagtaaataaaagagtcttacgtccttgttttttccacaacaacaataattgtttgaccacttgcattttacccgattttgcaggattcccatagtttttagtatattgtaatttatctttttctaaaagatcaggatggttacaaatttttcgtaaaatgtcgatgccaaataatacattttttttgccattttcaatttttgttaattcgtcagaatgtaggaactctagatattttcgcttttggtattgggttaatttacagaataaaaccatttctttcttttcaggtaaatccttagcaacatcggtcttaactcttcgtaataggtaaggagatattaaatctcttaatgctactgcacacttataaccagtttgaacttgcacatttgtagcattagcatatcctccggtattaattggcaatacaaactgttgttgaaatacaggtaaagttcctaatttaccgggataaataaaatcaaataaggaccacagttcatttagattgttttgtattggggtccctgatagaataattctatttggtgttttcaattttttacatgttaatgatatatcagaatctgggtttctaatcttgtgaccttcgtctaaaatagcataggcccatttaattttcaacaatttatcagaatggatccgtaatccaacatatgtagttataaggatatgtccatttgtggcgaccatattaatcaatgaatctaaggttaaatttgtttggatttcattttttaatttagaagtatttttcaaactttcataagatatttcatcaggactagaattaatgagtatttgttccaattcttcctcattgatagtttttttattattattacccatccctgaccccatggaatgtaaaatgattgatctgaaaggtggccaccaatggtgcaattcgttacaccattgtttcataactgtagcaggacatacaattaatactgggccatttagtaagcctgaatgatgtagagatgctaagaaagctataatttgaatagttttacctaatcccatttcatcaccaaggattccaccacaattttgttgatataattcataaagccattgaacacaagtcttttgataattgaacaaagatgaaaaaatttcaccaggtattttgaatgtatcatttaatttggcatcaggaatttcaggatttggttttccccattctggtgaatgtggataatcatcatgttttcttaatttggatctagcctgaatccatgatttgagtcttttttgataggaatactcatccccatcatctttggttacatcaatttgactctttatatcatgttcactatcatcatcatcagaatcattatcataatcataatcattatcattatcattatcatctttgctgttatctgtatcattatttaatgtttttaatttgtcatgtcctgtataatctttaccatttagatcatatttattatcatcaatattatttgtattattatcctcttcaattgtaaacccattggaagtaccaaatgcagtaattttgcctaatctaataagatagtccttctctgattcatcagaacgtttaccgtctaaatgcttattgacactttgaggatcatcattgtttttattatttttattgtgaatgctggacttaagttgtttaattctttttttaatatcacttatatcattttgtacattttttagatcaccattaattagtaaatcaattttattccttaaatttgatttaactgagattctatttgagtttgccaattttttttcaaggtaggacttttcggataataccttgttcaaaagattggttgatctttgcaatctatcctcttcctgttcaattaattttttgttagttaagaattcaacatctttttcaattttattttccaaagattgttgtgataaaatattgacaatacctaatttttttttaattgtttcattctcatgttcatcaatattttcatcttgatgattattagtggtaatagtgtcattagtcggttctacattataataatcttggttcatgatatataattacatatggacacacacacatatacaaacagatgatcaaatagacaaataaacacagatgtatgtgtatatatgtatgtattgttcctcatagtttttcagtgcaaggactatgaattatatataatttatattattctttcaaaaatgcaagaaatcttaaaagagaggggaaaaaaaaaagaaagaaaaaaagaaattctggaatttattacatttcctaaaatggaaatcattctattgttgattagtaatagagattactaattacagtatagtgaggtatcaaaactatgtgattatcatggtgtggttatggttcagtgatgttggtggtagtaataagaataggaggaggtctattcatatacatatatgtatatgcatgtttctggtgtggtatttgatgtctgatttgtactgagaataaaatagatatcgttattgcattttatatacatggacattgtaacataacatgagataacatgatatatatatatatgtatgtatgtatatatatagctattcaatcctttctttcgctatctagaatttctaatttcttcatctcttctcttggatcaaaattccccgaacataggttttcatactgttggtcatatttacctgtagacaaaggtgcattacctctcattcttttggacatatccaccatcccactcttgcaatctaaaaaggctttcatttgagctatacataattcaggtaattccttcctcaagtctgggtcatctacacattgttgtggtttatgtcgttgaatcattacacatggagatctttgtaagcatatggctacagcctttttttgatctttacaactggcacccatctttatatccctagtatccaatatttcttacatcactttaacacaccaccagtatctatatatatatatatatatgtgtgtgtgtgtgtgtgtgtgtgtatatctatatttgcatatattatgggattttgtatataagacactattctgtgaaacgtttcttttttttttgggatcctcctttttttttttattttatttttttttctctctcgagggtctttgtgaagaaaatataggtggattatcataataataacaatatgacgtatacgtgctagcatttatatgtataggcatctgtatgtatgtagatatagagatagatgttggtttagaggtattgggtgtgtgccattagtgtctattaagattatttttttttgtatttttttttttattacttggatagtaacagacatacaaccatattatgtctttgaatttcttacctggacgaccaaatgatacaagacaaacagcttgtcaaggttattggcaaggtcataccatttttgcatactgctcaggtaataatctaatcatattaactaacgcttttactaatttgcagactatttacttagataaagattgcctggctgtcgatattaattcaaataatgggttcattgcgatctccgtggataataatcatgtctacatatacaaacctatctaccagatcatgaaatcaccgaaatggtcaaaatgttgtcaaatttatcacgatccatcaagagtaaattgtattaaatggggtggggacaacgagttgatcttagggtctgactatctttcattttggaaagtgatggatcatttcggtgtcttcgaacccgttttactttggaataaaaggcaaccgaaacctgtgtatcagatagatatcaccaataattctcaattgattgcaagttatgggaaatacgatcataccgttaaactttggaaaagaatatccataagtggtgatcaagtaattttcactttgattctattacctcatcctgtttctgtcacttcaatctactggaagaaaatgaattacaattatcttgataacaataccagtggtaatgataatgataatatacaagaacaacaacagcgactgcagcaagttgaaaataactgttatcttttgtacactttatgttctgataaaaaattaagagcttggttatgcttagaagatgatcctgctcatttaaagatacagaattggacaactttaacgttaaatgatacaacaaaatattgtttaattttagataattggattattaaaaaaatatattttaataataatactaagcatgacaaaaaagttaaccttaatttgaagatgtttttaaattcagatatcataatgtttggcagtgataacgcagatgattgttttgatatttatgaactaaattataataatggtgttacagataatatgggcagtaataatcaatggccactgaatttgataaaaaataagttacaatcaagaaaaatcattcatccatccctattgaattcaataaatcacacgtttttatattttgcagatttgcaaccgtatgatgatagtaatactgatgtgtcattaattattcacgatctacaaggtgttattaaacaatctttaataaatataccagaatttgtagatcaagaattttcagtaaataattttcaagattcagtagcagtggtccatttagagcataaatttactggccataataagtcaattcaaagacttattagaagtagcgatggagaggctctgttaactatcacaagattctcagagaattgtgtatggacaccacagcagttaggttcaaatggtggtgtcactttgaatctaaagaattttgttaaaactgagactccaattaaactggctgtcatacatgaaaagggtaatctaatgatttgtctactggaaaataataaattacaagtatgggattgttcttgtaatagaaaaaatttggaaaatgatttcaatgactccatcttgaaggattcttatcaacttgatgatgatagtgatctttgctccccattattaatgttaaatacacctgagacacatcatagtcatgaacatcattttgtagcaattatttattcagatggttccattaaagggtttgaaatatctttgcagagaggtatagaaaaagttacatcagattctttaccctttattaaaaatggtgaaaacagattatacaaaatatctattattgatccagttcattctacatttgtaagtgatagaccattgatatctttcattacaaaggatggttttgtagagacttatacagcagttgttgactatgataataaacatattatatggaagatatcgtcgcaattaaatactgggatacgaaatgcacaatttattagaggttcttcgactggaaagctgtgtattgttagctcagattataaatctatgtcactttgggatttaaatagaggaatcctggaatatgaagagtccttccaagatcagattaaagatattgattggacgagtacagaattgggtcaaagcattgtggcaattggattcattgcatactctttattgtacacacagttaagatacgattatactaataatattcctagttatttacctatagaaaagatagatattacttcacatacagcacatataatcggtgattccatatggatgaaaaatggtacgtttgtcgtagcatcaggtaatcagttatatataaaggacaaattgttagatgtctctgatgatttcacacatagatccattggttcaagaaaaattctgtctaatgatatattgcatttaaatagtgttcttaatggtccactacctgtttatgatccgcaatttttaatccaagctatctattcaaataagatagaattggttaaggagatattattaagattatttgtgaagttacgagaaatcgattttaaatctatggatgttactactaatttaccttcagatttaaatattccgagtcataaatttttggtagataaaggtgaacattatgatgtagaaaaattccctgatccatatcctacatttgataagactgtgggtgtttctttaacagaacaattgactagaataactcttccatatataacacgtcatcaacaaataacgttgataacagttattgaagcgatggaagaggtggttaaataccaacacattatggatcataatggtattagattcttattgggggtgaaattatttttgtctcatcgtcaaagtcaaaaatcgctactgatgagagatatctcatgggcattacattctgagagcaaaacattattattatctatgtttgatagtaatattaatacatggaaacacgcaaaagaatataagatagtttattggcttaaagaagatcaactaaccagtaagtttgaacaaatagctaaatttgaattttctaaagaagataaaagagatccaagtagatgtgccgtattttatcttgctttaaagaaaaagcaaattttattaagcctctggaagattagtacaggtcatcctgaacagcagaaaatgatcaaatttttaaataatgatttcacacaacagagatggagaacagctgctttgaagaatgcttttgtgttattaagcaagcatagatacatggatgcagcttgcttcttcttgattggtgactcattaaaggatgcagtgaatgtactttgcaaacaagttggagatatagatttggctattggggtctgtagagtctacgaaggtgatgagggaacaatattaggaactttactaaaaactcatttactaccaacggctgttttaaataatgataaatggacgacaagttttatatattggaagctaagaagacaagatattgctattaaatccttaattacatctgcagttgatttagaaaataatagagaattcgtgtcagatgaaaagttggtcaataagtcatttttggtagaggatccagcattattatatctatatcgacatttaaggacgaaaaatattaaatatttcttgggttctttggaattgggattaaaaatagagtataaggttgtccttagaagtatagacattctttgcagaatgggatgtgattatctggcagcttcattagtgaaaaactggaagtttattgaagaatcaaaacatacagtgatgaagcctcctgataattcatgggcacagacttccattagtagttttaataaagaacctattaccactgtaaaggtaagaccaagtctttttgacaaatttgacagtatacaaaataacaagataataagttcaacgatgagtaatcaacaattaaagtcgccaattaatctgttagataattacaatcaactacctacgcctgccagtagtaatagttcatccagaaatattttagatgattatttattacctactaaatcgaaaaaccttctagacgagtatgcgccgtcaaataaacctaaaaatcctttggataatatttcaaatcagcttgatacaaatacttttaggaaaactacaccaccagctactgcacatagtatttctactgtcgaatctactgtttcctcagaaaagaagaaggtagcagcagcaccacggaatttattggatgattttatgtaaactgctattctaatatataatttctaaatttcaggtcatatgtatatatatgtatatatgtaggttctttaaaagaggatatattagtagcatctatgaaataatttaatttatgatagagaggttaatggaatgcaataattttttaaaaagagagtagtcaataagtattgactaagaaaaaaatttagcaagacttttctttgtgttttcctttcttttttccaaaatctcttctacctgttcaattttcttaataactactttatcatttggatttaaatcattacactgtttgtaatcttttaatgcttcctcataccttttcttaacaaaataacaattagctcttctataatatccttttgccttgtccatgtcaggtacattatctgaatctaatagataagttgcatacttaatggattcattgtaattttgcatattaaagcataccaaactaatattcaaatacagttttaattttaaatgtgagaatttagaatttaaatctttattaatactaacatctgggatatattcatttgtatattttaaagattttctatacttaaaaaatgcattttgataatctttctttttaaacaataaagtccctgattcctttataatagtagcagcatcaagtgctttagagaaatcatcatcattaaaatgtttatcgtcatcagggtattcttcataaatatcaccaccaatttcgtagttacatgcgttatataaagggatctccatagtcttattccaagcaccacaatcggcgattcttatacatttttctggaaaaccatctgaatctactttggtttctttgatggtatgaattacagatttaccatgtataactttaccaaaaatactatgctttccttttagatgtggtaatgccgaggtatttataaagaattgagaactatttgtgtttggtttacctgaattagccatggctaaatagaaaggttcagtgaattcggcctgattttcatcaatgaagttaccataacatggaatatcaaccttttcagaaaactcctcttcttttgcataaattgagcaaccacctttaccaatgtcatcagtcttttggaaattttttgatccatacataatatcaccagcttggatcataaaattctttataacacgatggaaatagttatttttataggaaagtttaccattaaagcctggaatctcagtacctatacaaagatgatagaaattgtaggctgtaaatggagccttatctgtaaataattccataactattctgccaatttttacctcatcgatagtaatatcaaaataagtgtaaacatttccatgtgaagcaaataattgtttaggatccatgatataacgagagttttataataatactagtccgtttgtgatacttagattcctcacaatattcaatcttaaaataaattagtatgtaagattaagaaaggataaaatcagttgaataaaatctaattgattattgatactatttgactttgtaaccaatttctattttatattcaatttttttatacctttaacctttttgtatgtgtatgtttactaaagtttatcttatcaaattcagtttttgacaactttttctttctgttctgtaaattcaatggaaatttctgaaatttcaaaaatattggaaaaggacattgaataaattacgtaacctcaagatggggagctagaggtcatttcaagaatatatgttatatatacagagttattacttttattaatttacctgtaaattgaggtcgcgaagcatcactagtggcttagaaaagtaaggtgtttgttgctaaatttgactgtattacaatcacaaaatatatataattattttgagagagataacatctaaaagtttttttttatgagtgatctttcaggaacttgtctcggtgaggatcctgtggcaattcttttaaaagaatgtttgaaattaataatagctattagatatcataataatactataaaacagcaaacatcctctgattatccattaatacttggtggaaataatgaatatttcaaggattttgatgaagatgaggaagatgaggattatgataatgataataggggcgaggagaaaaataagattaggaataatagttcaaatttatcagatattgtaaatttgaaaaatatattaagtggattgacttcaatatattctatagattctttaactttactaaatccatttttaaatgtattaacgcttaaaaaatcaaagaatgagcatatcaagagattaacattggagtcacttaataaaatttttacgcttcaactgattaatttaaattgtatcaattatgttcaagcatatagaaaaacagtttccattttaattgatcttgatccacatttcagtaacaatcaagacacaaaggatttaatagaaattgaaataatcacacttctacaatgcattatatccacatcatgtgggaattgcttgtctgattctttagtatatgaatcattaaaaaaagttttattgattgtttgtagaagaaaattatcagacaagttaaaagtcagagcagaatatgtccttaagagaatgactgttcatgtgtttactaaacttaagtttatgaatctatctgctattaataataaatatattgatgatgaacatataaagaaatattttgtgtttaaaaaggctaacgattccagtgaattcgatttacaggaagaaaaagaggaacaactgatcaataaaaagaatcatgagaataatagcagtgattatagtgaagtaaatgtaacaccaaattacagtcttcctgtgataatacaatatctggagttattgttatctttaataagtttggaaaataaatctgaatatactgctcgcactcaagtagtgggtttggaattgataaatactatggtagaattagttggtagattatttttgaaacatccaaagttattaaatatgatctcagattcagtctttaaatctattgcattaataatggaaacaaatgtggataatattttgttaatggataaagttttaacagtttatacttccattatattagctcttggctggtttttaccaaggcaaatagaattgacattgcctagattatttgaaaaacttcaaaattcctcgtcactccattttcaaagaattattattgaaaaactttcgttgctgtgggtgcgtgacccatctttgtttattaatttttttgtgaaatatgactgtagttttgaatatcacgatttgtcggttaaatttttaacagtaatgatgaatatgactaatccagaaaaggatctgactatttcaacctttgggttagatgctttgacaacatttgtcgattatgtttacaaccaaataaccaaagtggatgagtttcaatttgatgatgcgccacaaagtataattctaaaagagtggagtagaaaagctgaattcataaattgtatgaaaatgtttaatgaaaagccaagagatggaattaaattattaatagacagcaaatttattcctaacaataaaggaaaagaagtagcaaaatttttatttgaaaatgatagtagacttaataaaaaacagctagggttattgctttgtaagcctgaagagacagaacttttgggtgaatttatgagtttatttaattttaattcatttagagtagatgaagcgttgagggtcctattaaccaagtttagattacctggtgaatctcagcaaattgaaagaatccttgaagccttttccaaaaggtatgttggatgtcaacagtacgtagagaatatttacagcgaagaagaagaaaatcttgctcaggttcaagctgatgcagattctgtttttattttaagttattctattatcatgttaaatacagatatccataacccacaagtgaaagaacatatgtcctttgaagaatattgtagtaatttgaaaggctgttataataatgggaataactatccacagtggtttttagaaaaaatttatgcatcaatacaagataaggaaattgttatgcctgaagaacatcatggaaatgaaaagtggtttgatgatgtttggaataatgtcatttcatctaatacagtaattacagagataccgaaaattcatttggatgatatcaattgttttacatctattgaagaaattcagtttgaaatgaaactttttgagaatgtcggtatacccttgattaaaaaaatttttgatttattagttttaacaaaagatgataacacaatcagtttgctgatcgatttagttgaaaaatgttacaaaatttgtaaattctttaaattgaaaaatatgtttaatgaattggtagcaaaccttgccactatgacaactttgttacctgatgatttaaatttgaaaaataatggtaattcaaaagatattgtaaataaggaattgggtgaaatataccctgtaatagatattgtagacaaagaagaaggtacaataattacgataagtccacattcgattaaattaggtgaatcatttaaagcacaaatgtgttctgttttatattttaatatatttggtcataacaagataacaaatttcttaaatgaagaaaactggaataatttaataaaaattttgctggttatgtttcaagataggatgattattaataatgtgaaaatgggaacattttatcctgaatatgatatcattgagcagaataatctcagcaaaataccacatttaccaaaggcagattacgttattgatgatatcaactttaaaagtaatcgtggtttattgtcatcatttgcctcatacttgaaaggtaatgatgaaccaagtgaagatgatattaaaaaagctattaaatgtaatgattgtattaagatgatcaatttcaaaaaatacatttgggccaatgatacaattgtgacaccaaagaatattatcgatttattcaacaggcatatattaatggaaagaaatgttactaattttaaatatttcgaagaaaggattatatgcattatagaattgtctattaatttaatgttacagtatgattggattggtgagattggttataaattatttaataagttaagtgcattatatgaaattgaaaacttatctaaatcatattatcgccgcttgatggtttataaagtgctagtaatatctctattaaatgaagagaaattattatcaaaattggttgaaaaggaaattatcgtgtctaatgagatatttactattgattatttcaatgaaactcttgatggacaatatattgtgaaagtaattatgtttagcatcgataagaataatccaactgcttggaagtttttgaattatttaatagtttccaatgtggataaaacaaattatgaaggaaaatatttgattaaaagtatcaatgattacatctccaatagtgagaatataacaagtatcaatattactcaagtcattgatattatgaaacaattgattaagtatcgtatagatataatagatattttattccaaattttaaatggtgaaattaattttgttcctcctattgaagttcaaagcattgtatctttaattcagctggtattaaggcaaatattggaccaaattgaagattttcatggtaataatgaggaagatgacaattttcaatattcttctgtgttactaagattaggcaaaaatctcaaatcggacaaatctcttttgaaggaatatgatgataggactattaaaataattattgatcattctatgttacaaataattggtgatattggaaacgaaggccaaaaattgtttaatcttgaagtattaaagttatgtaaggatatctttctttattatttcaatggagtagatatagagtatgaggataaatttaaacagatccaagatcaattatcttgatacatgatatgtatatgtatagaatattatttacaagcttatgcatatctagatatatacattcgtatatttaattaaatatagatataattcatttgtgttatactgcttatttttaatttgtataatattagtagtgtagaaatagttctttttttttcttgttttaacttattttataatgtaacttttgatttagcggatctatagaatggaagtgtgtctttgatacttttaacacctaaaatatatgcaataaatctttctaaaccaaggccaaacccaccactggtccgataccctgatcgtcttaattggacataccagtccaaatcttgtgatacattaggtatcaacttttcataattatcctcacgcatagaaccaccaataatttctccaagttcggggaatattaaatcaaaacattgaacagtctgtaacttcttattatttatattatttttcatatagaatggttttaaagattttggataatttttaataaacacaaaaccattagagaataatgttgaagatacccatttttcatgttctgaattgatattattctcatttattgtgtccaatgttggtggtttggtggtgaaagcatttgaattcccgtcaagttcttttattacatcgacataatcaatctcatgccagttttttgggtttgctatcctttcccatctgtccgaaatttggtcggtagtcattgtatccatcggtagaggtaaatagtttttatgactattattatgattaattaattcatcccaatccaatacaactttttgattttttagcaaatcttttaaagtagatataataaaattttttgttagagagactaattcatctaacgtattatattcagtagtctccaattctagcatccaaaattcagttaaatgtctgcctgtgtctgatctttcagctctaaagcatggtgttagactataaacgttagataatgattgtgctaggatctccaaatgcaattgtgcagatacagttaaattgagcgaattcggtgcatttaatgggaagattcctgagtttgtactagtcagtttaaaagtctcattattaccttctgtgtcatttgttgtgataattggtggatcagttttaataaaattgaatttatttgacaggatattgaagagagttaattctaaatgagatctgaatctttgtaatgaggccatataattatttttgaatttgtgtaaaggtgtatttcttaaagttgataaattaatattcttttcgttatattgtaaagacaagtcaattgaatgtgaaatattgaaagtagagtttggggagttcatttgtaattcgaagaattgagttctatttggtgttaatacaacattccagttatttaattggatagtatctcctaaggtaatattttgaatattattatttttattagatagtacaagttttacagaagacgatgttgtgccatccattatatcaacaaatgtaaaatttttcaatttattaatatttgttatataaccatttaatttattgacatgttggccgtctttaactatgccattttgtacatcatgaaacaactgctttattatatactttcttttaaagatttttaacattattttgtggtgacctattctttaaatagattggtatgttttaatgcatatataagtaagaatttaagtacgtatagatattttacaagaaggttattttttttttggtgtaatattgtttagtatttatttattattcagttccctctttctctattacctttcatactttcatttatttttctttgatttttgttgaatagagttagagttcgaaagatgatatgttaattaagcaaaaaaaaaaaaataaaaaaaaaaaaacgagaagtatatatgtataaatatatatatacatatgtatatatagtaagcaggaacaaaagatgtctgtttaattgacattgagaaaatggtccattaaaagattttgatatttagtgatatttgatacttgtatgactctttatatatggcccaagacaatgataatagtatgtaataataaatatataaattgaatcaaagaatgaaggaaaagaaagcaaagaaaaaggttttgagaaaattgggaaacacacactaataaacattctattaaactaaataagtttcttcttatatgcatacatacataaatacacatatatacatatatataaaataaaagtcataaacttattcgaagtaataggtaatactttatctcgaggaagacaaaaataagggcaaaacaaaaataaagggacgacatgtgacgacacaatgacaagaggggagacacactcctcccctctcgagaattgtaattatctactgtctaaaccagctaccaaagcacacaaaactctcttatatacacacacaaaacaataaaagagtgtggtatcaatagcaggtaacaacaataagtttagacaactacaataattatgcgccacacatcctgaattttctttgcttgttgtaacaatacctgatgattcacctcccatattcttatttaacctaattttaatcccctttttgttcaaataataatgtaacaacagaagaagcgtattacatcattatagggaaacacacatttataaatcaacttttgtcttgtttgacacacacataacaacaaagaaattataacaatggtataattgaaaaaacttagtaaaacaaaaaaaaaacagaaaatagataaacattgaaaggctaaaaaacaatagcaacaacaatagcacacaatatatgttgtcactcaaagatatagtaataagaaaatttgcattcttcaatattaattattaatctaatatgtagtcttcttttcaaattaatggtacagaaaataaaaaacacataacaataataaacattatcattaatgtaaccaaaccaaaaattttatcttttaacctaaatacgtaaaaaacaggggtattgtcatttatttatatattgtttcaatcaattaaaacatagattggaggtttgtaatgaaataaaaaaaataaattgaaataatagaaacaaaaaaaagaaaaggcatagtgagaaactgctaactaagaagttgcaagattacttagaatctttgtaaacctctttgtctagcttgccattttctgtagataatagtggaaacaatagcaatacaagctaaaccaactaaaacaaagactaaaataacaccacctggtaacattttttgtgtttctacttgttttctatgttgttaaattgaataaatgttgtgtatgggttctttccacaagtaaacaaagcaacaagagaaccaatactacagaaaacacttgataaggagagtaacaggagaaaagtatggaacgtaacacacgcaagcaaagagggaagaagaaaaagttttccttatataccggtacctggaaggaaatgaaagaagagacaaatgtggaacttatctttgtatgtttatatataagtttgtgcgcacatattgtgggtgacgaatggacgcccatcaggattactctttaagaaaaaaaaaaaatagaaatagaggaagagaagaaatgaatgagattgaataggaaaaacctcttttttttctttgtttgtttttttttatttgtttatttatttttttttctttttgttttattttctctacaaaaagaaaaaagaaaagttattattttacgcaaaaacagaagaaaaaagcaagaaacgaagcaggggagaaaaaaaaaagacgcagatgttatatcatatgctaaaaatggaaaaaaaaatagtattttaaaacaaatctcactactagttgaaaatatcagttctaatgatagggctagtaaaagttttccgggaaattacatttttttgtccgaagagtttgtactaatagtaaaaaaagactgtcttttatttttttcttgttcttgtaactattttctttctgacttcaaagagttataactatcagtaattaaagaaagagaaagaagtaagtatgctttttatttttgtaaatgagagctaccttctaataagaaaaaaaatttgtaatgtacgctttacatagtaatgcctagaactttgcttgtctcttcttatgtaactaagaaataaggtttaccatagtagaaggtttgtttttttcttatttttaagaatctttcgtagaaaaatttagggttaacatgaaaaggggagatgaaaaagatagtttaaaatatcaatgataattctttgtttttttcttttcccctattaactaaggtggtggtgatataaactaaaatcgtctccttaatcatttctcctattttttttctctttctactaaaagaatttttgataagaacttgatggcgcgtcttttttttgtttttgttttgtgtatttctggtttttgttcatttcctttttgttgtttttgtttctattattactattttcggaattgataaatataaaacaattggcctaatacggattgtaaacaaaagtttttccggatacaatatttttccctattttggcaaaaagcaagaaaatattttcgttaattatgtttggtttttggggactgtatttccctttccagaattccctattctcttttgtttatattattattttggttttttcctctttgttcaattcttttttttcatcacaaaatagagaacaatatgaacatgaaaaacaacgacagccatagcaaccacaactacgacaagagattggctaacaacaataaaaaaagaaaaaaatgacataatcctagttagattggtacatttttgaaatcgtattgtctttaattggtctttgatcatggttgatggaataatgccgaggtgtttttttcattttccgtttcttttttttttttttttttcaaatagaaattattaattgtcatttctaattttgttatcatatcttttctcgatctaaagtatagatcggttagctaattggatcactggctgtgatgctacaatagtctaatgtatatgtatatacatgcatatgtatgtgtggacacacgtgtgtctgcgtttatactgggacatgcgaggaggcttgaaccacgtcttcgtggctacgtgagtctcttacctctaattatgataattcaaggttatcaggctctctttctgtcaactgactcatcctgataaatattgtcgatgatgtcattgaagatatcgattatttcttcctccgtctccttcagatagtcaagcattgaatcaatcagattatggttgccttcatcgttgttgttgtttttttcatttttatttttattcccacttttattgtcacttttttgtgttgaatgatttattgattcagtagttgtttctgtaccgacgagcgtggttgtttttgtattggttttagagtttgtcgttctagatgaagttaagctggagaaagttgtcgttggagttggaattgaggatgatttcgttataatattcccattagtacttgaacttgtaaccgagtttgtgataggacttgtacttaaaattggatttgttgtcgagctttcatcgattttaatggtattacctatttcaacatagtgattgaattcggatgtatactgtatcgtatatttgtctctgtttggatttctgtctctaacatttaaaccgactaatgaacttatgatgtcatagatggcaatattattaaatggcatcaagtatctattattatccatataatttacaataacatcatggaaatatggaccttgtccaataaatatcgaactttcttgaattacaccgatatcttttgtattttctaccaataaatatggattcttaggtattaaccatatatcatccatcgactcatagactattttatcaatcttagatgggttttgaaaattaatattatattccttaggtagattatcctttatatgtaatgatacttggcttgaatcgatctttgttttcaacattctatatatttgatttctatcgtttgtatctttaatttttatcgaaattaatctcccctcatgattattaatccgatctattttctttaataaattcttgtatatttttttggcatccttattactattttcttcttccaatttgaataattgtcttaattcgagcttctcaatgggtttctcctcgttgttcatagtatcgtcttgatttaatgttttgatgtcttcagtactgctaccactgtcactcaatattattatatttgttaagttaaccagtaaattacggtgtcttaactcataaactaatttatgtaacaatctatccatatgattaatcttcttataagcagagatttgattttcaccatggataatagaatccatcaaatcgttcattgtcagtagaattaactggggacgttctcctttttctataatatcaatcaattttataacctcgtcgatcttaccttcactatctaaatgttcactattatgataatggtttccatcatttttgaaatgtgtccaaccaaaggatttcatgatagatgtattattattattagtaaacactttatcaatggtgttccaaataggaatagtaacattttcggcctttaaatttttaatatcatctttcaacattccattatttatgggatagtttcctgtaaccatacaccaatcttgcaaattagaatcatatgggaaattaggttctaattcaccaataattgtattcattgacacattatttaatttattttcatttggataaaccatatcatataaaaagggactatgatctttatttatttgttcaaaggacatatacctcaaatttatcacaatagttagtgggtaaaacttatgtgtaccattactgtacaatttatttggattgaaattgatcttactgttgtatagatgtttatttgttgtagagaatatcttggtgatatcattattttggctcaagttactgtttttggaccaagtaatctttaatattacatgaatcatgaaagttataagcagccccattataatgatccatttcaagaatcttattaatataaacattcttcttcctagagaccattttctactgaaagatgggaaggttcttgagtcaaatgattcgagtatgtcattattgtcattagtcgaatgaataattctgtctaggttctcatcagtatctaaatcatacaatggaattccatgattatttaacttatttaatcttgattgtgacaatgtttttgtatcaaaccaagacttgactttatttaataagctggaattgtttcgtaggaataaactgatagtattgttgttgttattagatcggtgcagatcatatctcagggggtcatcttggaatatatcatcatcgtctgtaattgcaataccattgtgaatttcacgatgagtatccatgctcctgacgtccaaatcaaaggatgagtcagtatcactaagttcagccatctttatatcaccgttgattgactcaactttatttattgtatttgaggttgttgcacgtttcttttttttctttatatacacatatgtgtgtgtgtctatgtatgtatcgaagatcttagttattaacttcactttaccacattcattattttttgttctatatatttttatctttatttgttcgtatttgtcttgttgtataaaaggtgatagaagaagatatatatcccattatatgaaaaaacgaagtattttagtcacttatttaatcattcccttgcgtacttatacatgtatatacacatataagtaagtgcttaatcatctattgtatagtaaatgatataatagaatatattttaaaaaatactacttggattatatatatatattatgataaagataataatataactatgacaataatgaaaaatactaataattgtaataaataaaggcaaataggattgttacattatggtacatttatcattattagaattattttgaatatttagtattctatctcgttcaattttcattaatttaataaattcattcattgaaaggtcgatattataattgtctcgggaactacattcaaaaaataatgaatttaattttttggataattgtcttccttgatcccatgaaacctgccgtgtgctttgactcttatttggagaagtattagaagcattggtgcttgtggtgtcacgtatatcacatttcatacctagtaacagtattggaaagtgttcagtgggtaaatctaaatgtgttataaatttactccaaagatcctttaatatcacaaaactatctaaattattgacattatagcaaaggatacaaccatccagattaacgaaagatttataataacttatatttaaattcgaatcatttttagattcttgacctactgtatcaataaactccaaagttatagtgtcaccatctaaatctagactatactcgttcttatctactatactgtaggaattactatcattatcaatgttatgaatattatttatgctagatatttggaaagggttatcatttgacgactgatttatataatttttatataaaatatagtcatccctgctataattactattattactattgttgttgttgttaaacatattttgtttcatatgatttttgtcagtaaaaagaatagtcttagtaaaatgattttccttgttggttggatagtaagactctagaaatctaaattcaacatatcttgtaataaaagaagtttttccaacattatgagcaccaataacagctattttgaaatacgatttatgtaaaatattattaaatctggaatattcactgcttctggaactatatttattattactattattattattattattattattattattattattattattacattgagaagcgatgtttaaagaagtattggtgatattattcatattgttattaactgttataaagctattatctacaggactgttattttccatgttgatattctaattcgattaattatcataggagtggtatatgtgtatatataataatttcatgcacaatatttgtttttttttttgcttatctgatctgtatagtttttttaaagcatagtcaaatcctctgctatagtagaatttgaattgtatcgttatctttttctcctagtaaaccacgacagttaagtacatgtacatatgtatatgtttaatatgtatatgtaggtgtgtttgtatctattctcatttgagcactggaaaacttgtaaagaaaaaaacaaaaaatgaagaaaagaaaaaatggaaacttaagtgaagcaatgaagcctgtaattttttgtttttatttttatttttattttttattttttatttcttatttgtagactgatggctatgaatacggctaaatgagtgttgggacgttatacagtatgtaagtgttctacgtatttaatatatatctacaattgctgaatatagaatataatgtgaggtgtaataatgtaatatttgtactctataaatgggtgaataattaaactatatttaatccaaaaaagaataaaaaagaaaaagaagaaaaattaaaacagagtaattacaatgttttgttattttgtttgttttaataaatctattttatttttcaatgtttgtaataaaatttgttgtcgttcgatattataacatagtttatatttatctatttctgaagtatctgctaaattgaataattctaacatatttatcctctcatctagcatatcatatgctgttagatttctcaaagttacggtatcattattgttgttgttgttgttattgctgttaatgatggtggaaatagcagaagtggcagtagtggtcactgtatttgcatttgttgaatttgaatttggcatgacagaacgtcagttagatattgaggggtacaaatgttttagaagattgtggagctgaatataaaagaaaaataaaaaaataaaaattatgccaaatgtcttctttttcctttagttcttaaatctagttagatctatattattttgtaatcaccaatggagtaccaatatagctatatatatatatagatagatacttgtgttcagttgtacatctgtctgctctctagtggttctggtaatgtttttctttttccttcacctttccttcttttttcgtttttttcttttctcttctcttttcttttctgtttggaatcaaaagcttttcgaacgttggaattttttccctgttaatttatggtgattggtgtttgtgggtagctgtaactgtagctgtgatagagagatatgtgatgggcaatgatagatagacctacctatttttcaattattacctacaagtgtatagttgaatagacatggaacatgttttaattcatatatttacatgtaaagaaagataaagaggttatttttaagtctctcttgttactttagtgcgtttgatctctaatgtattattagatgatatagaatcgtcattttgaaaagtaaaccgcgaagagataggaaaaagattttgtttatctaatggattaataatggttgtaatatcatcattacgagacattatcggaagcacattatatgttaacgttacatatgatcagcatatcatgcttacagggaaattacaagccattgacgctcaaggtaatcttttattggacgatgtcaaggaaataacaactggaaatagtagtgatattggtggtagtaatggtagtggtgctaaaataagaatggtacatcaaagaatgttaggtttagtcagtgtacctagagactcaattatatctgttaagattgataagactctctttgagagaaaacaggtacaaaaatcagatattattaataatgtcatatagcatctttgcactattgtgtatttgtatatattaatctcttctattcataagttgatttgttaattaatactctggtaattttataagtcaattgtcactagtttgttcggttttcgttttttttttcatttccattttttcttatttaggatatttcccttttcgatacttcccatatgacagagatcacatcttgattgtagtacttttataacagtttctcaatttgttttttctaatagttgcagttttaataagttatctaaaagttttattgttccaatggtattattcttggttttttttcttttttcttttggttttaagtttaagacataagtatatgtatctatgtgtagtatggaccatttcaatcaatgaatattcaaatagctaatataataacgttgacgtatatacgtatatatatatatatatttgggtgcatattcccttaattctataagtatactgtgacttcttaacgcttctctttgcttgtttttttgtatgtatatatcgccaacataaaaagatattaataggtaaattaagtcaatataaaaaaaaatcatgtctactacttctcagttgattgctaagtatctagatatttataaaaaggctactgaacatcaacttacaaaagatctttgtcaaggtattttatctgataaaagactttttgtatattttacacaggatttaaatttcttcgaggttggtctaaggttgatttgtaaaattacttcattggctcccgatacctatccattaataacgttagccagaaagattgggtttttcgctaatgatgaaaacacttatttccaaaactgtttagttttattgaaagaaaacttatctgatgaagacatcattaaatacggtgataaaacaggatctttacctggtgttaaaccatatgttgattttttaaaagaaatgatagactcaactaagtttacttatgctcaattgattacatacctatgggtctgtgaagctatatacttgaaatgggctcatgacttgccaagaaatgaaaatttacattggaaatatcaaacttggatagatctacatgatggcgctcattttattgaatgggttgattttttaagaaaagaagttgataaattttcaatggctgaagttgagaatatgtttgtgaaaatagttaagtatgaatacgacttttttgaatcatgttataatgtatagtcgtttgtattcttttttgtttttttgtttttgttttaatatctatatactttttcttttgttcctgttttgttactaaatatctttagcacttaactctaataattaaaagtttcttaaaaagttttttctcagtaatttcccattaatgtgaatctgatgaccatttaaatgcatttacagactagatccagggttttggtcgccccaaaaccattcattccaacattaagtattatccaggaggtatatctttccggatttctaatcaagttttgttacataatcatatataaaaatctatgtctctcaaaaagaaattgcaaatttgtgatgagtcattgatggctaatagttgataaatttatgatgtttttatcttttattgtattactatatcttatattacttttattttcctagtttaaatatgtgatgaacatgtacaatagatattactcatttcaccgtattagttctgtttatatatatactaatttcaaaatagcgcataatatcttcatattttcttgctctttttatatttttgtgtcaattggagctttttatagaagataaggtttcaacaaataaaataaacaaacgaagcaaaaacgacctattcttaaatcacaacaatatacataaacaaaacaatcaacaaattatacttatgtatataaagaatctttttttataaacacacacacacatatatatataacctctccctcctgtattatatatcttttctttttgtttttctttcccataatcccctttctcttttttcataatcaatatatggaatatctaacaatttaaaaatcctttcttcatcaaaactttctatcatttttccacgatagaaaagtccatgttgtgttaatttgtaaccttttttaatcgcctctaatcgaatccatctattaaactccgcagatcctgtccattgtaatcttgcagcccccaattcagaccatctacaactaaaaaagtccaatcttctacaataattagttgtgccggttctatcactcccagacataaataaatcaacatcctttaatttgctagatgatgacttttgtaaaattgtttccctttctcttatagttagttcaaactctgatctttgtaatattacacccaaataataaattcgagaaaatttatgactaaccatatgacatttttttggtaatttcaaatctacttttttgaaaatttcgttaaaatcatttttaaattcatcatataattgtgttgataattgtaaaatacatttaatataaccttctctatgtagttgtattatcaattcttgtaatacagatactattattttgatgtcatcgcaatcctctctatagaacaataaatcaatatctcctgaactttccataccacgattataactaccttgaatttccacatgacatctttcatcaatcttggaaagacattccttaatcttattgaaatgtattgcagtctctcgtctcaatatttgcatagaccattcttcataatatttccaaccatatagtaaaggccattcagttataaaatcctgagataattttattaggacatctttaaagctattcatccttaacaaagcccatcttttagccatagatggaccaaccccatgacagttttggaaataagtcaatatttgttgatgagagatctctatctcttctccaggtaaacttcctgtagtaacaattctttggattaaattcccaatacgggggccaatgtgaggcaattgcctttctgcttgtttaccagaaacaattttaaaattgcatttttcaataacctttttagccaccgaataattgctactcttaaaatggttaccttctatcttatgtctttctgcaagatattctaatgcttttataatctcactgttattttgagtttctttccttggtgttttttcaacatccttcttatcattttcttcatcctgatttcctggaacgcttccgatggttatcgatttatccacagacaactgttcatctatattacaattaccattattctcttgattttgtttacggtctagattcaaatatacttgttcattaaagttggacctctcatcctcattataaacttctatcatttcttttgtaaaatgaagcctctgttggatatcattaatcggtactatatgtttacttaaccatctaccaacttggctacacttaaagaagaataaatgaaactcatctattttattaaataatacatttaaatcaaacgatgactctttaacaaataaaaccatgtcgttgataccatctttctgagaattaagaaatgaatcgactattaatactacaatttgattattatttacatcatccattgaatggactatggttccaccattttcctctattaatttacatctgaactgtgttgaacttgcatttatattaggtaaaattacaaaacctagcttctcaaataacattcatatgcacgtaaatcatctattacccttagtatgtaataaatatgagatatatgtactataggtgcctggtaaaacgaaggaaaatctctctgttgatctataattaacgcataacaaggaaggtgtttttaacagtttgcaactattttcttcgtttttcacaataaaacctttctaacccctccataattttcgttctttaaaaacagccagtatacctttatttcaaaggattattttttttctatagtcaacttgacataagtgaaatagttcaacaagaaattccatacacaattaaggaaaactataaagagaacttagatagagactagaataacaataaaaatacaaaatataaataaaaatatcatgttcacacacttctataccaatcactagtgaaaaaattagagaccggctcaaactggtgcaattgtttcattctctgcaaaaaaagagtaaataaaataaaccattatattctgatatattaaatcaccaactactgacacttagccattgcagttgataaggtcgaattggtctttcttgcatgttttatttgtgatgagagagtaagatcacaacaaaaactgcaactagtaggacaggtgaaagataggtagagaaaaagatatatgaacacaaacttttgaataatttttttatcttgtttatttttgttttatatgacttttttttcttttcgtaattttttttttaattttttttgtttattttctttgatctctgtcccattcacaaaacgaaataaatactaaaaagataggagaaataagaacatgtatttatcattaattaaccgtctaaattcacaaataactatattcgttgtaacagataataatattcttctgttgtattttttccttgacgttcataaaaatgtactttcaaaaataaataaatatctatatactcctatacgtacgagttatattaatcgaaataacgaggatcactcaatacatgatagaaatgtccatcctccccatctcctctaaatttatctggaaattttaagtcatcatcatcctgttcatttgtccattccgtattatatattgagtctcctgcttcagttaattcctcattagttaacacttggaacttaccaacttgcaattcagtatccgtaatactacctctagcaactctagcatatccatttctcttaatattcttgtacaaaatgtattcacaccatctttcatcatcactcggatctatatcgtgcatacctgagatgtcactcacatatgtgttataattaccttgcaatggttcagtgaccaaataacttaatagtagagttggtctatcggtggaacccatcaatttagctaatgcttctgtttgaagttttctatcctccacatcttcttcttgtccagagtggaaaacaaaaatatcaactaatacatcatcatatgtccttagggtagcatgtatagctggagcaagttcacccacaggagatggcatcaagaaatgcgtagaattgacaatagggaacttagaaagtaatatacaaccccatgtgtgtttatttggaccaggaccgaaatcagcatacatattcaaatcatgtgaaagtttactagttagatctctgtttcccatcacaatacgttgagaatcggtttccaataaaccgacaacatctagttccatatctttgattaagttaatcatacgatcttcagatgcccacaagtcattatctaaaccgaaatgaattgtccagataccggcagtaatcactttagaatctggatgatatggaataggaactcctgttggtctattattataagtgaaaccaccagtcaacaacaaacaaactaacgcgaaaagcgaaattattcttacaaactttttagttaattgagtttgttgaataggttttttaaatattaggcctaataaaatcaatgttgtagagaaacctaaaagtaactcaatttgttctcttaaaagccaacctcctggaacaaatgcatatgccactacccagacatgtcctaaaatcagaatgttgtaaaaaaataatgaaaaggtgaaaacacagatgctcctagtagacgccaccagcattaaataagttggagtcaccatgatcactgatgcaacataaagtaaaccacctccaatatatttattccactctttaacttctttcaaacatagaacaatagtagaaatgactaaaataaatgatggtattaatggtttattgataaaataaacagagagaaccacagcaactaccattattgcacaagttaatgcactccatggccattgtaagggaccagaatgttctgagtaaccttcccatgaccagtatataatagttgatgaatctgttaataattgatgaatactaaacattaatgcaccaaaacccaaagagattaaaaatttaacaaaaatattaaaatcacttcttggtaatttagatggaagtgaatgtatctggttagtaaaaggtactaccataccaaatataattgcaaccacaataccagttttattgtaaccgttagtatcttcattcatgatagcccaaattgggttattagaatagaaacccattttaataatcaccgaaaataccaaccccaataaccacgaaatagagtaagaagtaaatacttcagtggttgtaattcttataagattttgaacaaatgtagcaacaagaattgcacaactaatagacacaacaattagtctactttctggtgtgttgattaagtaggcaccaatactaataactccaccaaataagctaccataatgataaataatggtggacatcagaggcaatgccaaaaagacacagcctgtagtaccaaatatggcgatttcataacctgaaatacccatataccataatgggaaataccataccatacagtataatgaagtgattgcagaccaaaatataaatgaattgactgtgttggttaaaatataaaagaaggaatcatatgtaaaaatcgtgtctttagggttaattggttcaattggcttcactttatcaaattgctttattgaaaccctttcatttatttccattttattatttgtgaataaacttctttttgaatctttgaagatatcttgtaaatcaatattaatagttagagattgaaaatctgtatatgataacatatcaaaaccaatatcaaggaaaatcagtgaccattcgaaataagcatatatagaataagcacctgccacatgcttaacttgatgctgataataccaatataacattgggattaacaacaagaaaaatgttgttgcagttaaagctttcttcaacttaaatggagaaactttagtaatcatgatatcccaaggtaaggtcaaaactatatatgctatcataaatatatcgtgaatatcatgatcatctgtacttgtaatgtatacccaacccccacatgtcacagtacgtaatacaccaactaataggataaacttggaacgacttaagaagaaatggcccagcaacaataaaaacctgggaaaggcagttaaagcaattaaaatttgaaagatagatctttctggatatctatcaccaatagttgccgacacactggggaaccattcatctgggtaagtgtaatgtgcatttgtgacaatcttgtgaaaatgtaaattataacctgtgagcaaagcggctacaaaagcagatacagcacatagtgtgtgtaccaatggaattattttcccattcaaggtaagcatattgcttgtaaattaaaaaagataagcttgtttatcttgacgacagcacacccagttttttttttacatgttatttcttttttattctcacacataaaatattgtattaccaaaggtttcacttatactcctgttatttttttttcctttaaaattttgtaaagtacgttttaaagaatcaaaaaaaaaagttttcatcaacgactttttgactaaataataagatatacagtagccagacactaagataagttgaaatatgtacagcagataaacacattgtaattgtatgtgtactcttcaggtgtataatgcaagatatgtaacatatattcgcacagtgttactgcagacgattttgtaaactccttaatctataataacatttttgttcttcgcatttacaaggttatatatctatctgtatatatctatttatctacgctactctatatttacagttaaatttatcttccatatatagagaacgacaaccaataattatttattttattttatatgcctgaaagacatatctattgtaacagatctttatctattacattgtctcaaattaaatgttaatcaaatgctcataatcaaagagctatcacatgtcttgtattacaggatgtaataaaccaacaaaaaaattcttcaatcatttaccaaaaaagtagcgtcgccaggtttcgatcctgggacatcagggttatgagccctgcgcgcttccactgcgccacgacgctctaacaaccgtcaatcgtggaatttattagaaattaataattgtttaataagaagacaatatttaaagaaaatagaaaatttgaagagaaatatcgcaagaaataaaaaaaatttactccaactaggttataacaagtaggtacatacacgtttaatctaaaaagaaagtatttataatttgataacatcagccattaatatggataccaagagttctaaattctattgaaaaggtagcagtatttaaattcactgtgtgaatccttgcttttttatgtaaggaaaaaaaaatagacaatataaagaatatgtagttatgtaaatacctaacttggaaaatacattataataagatatacgtagagattgtatatgtttgaaattctataaatttctacttgaacaccaaacattgtgtttctcatacatgctgtattgtttctacatatcactaaatttttattatctgcaatttgctatcattaatgactttaaatatagtatctacagtatcttggtatatattccaaaaattcattataacttctaacaaaaaaggatctgagatttttacaaatgctcaattatatatagcatttaaattgttaatcattattagaaatttccgtaatattttatatgttatgacgttttcaaataatttaattgctttattttgttacagatagtagtaaaattaaaaaagaaaacgtaaaaaaacatgtatatatgtatatatgtgttgaaatagaatgttctatgataaaatagatagaacaataagattttagcagacactaaacgataaattgttgagtaataattgttgagaggtcaccaaaggttgttgagtttgtttattaaatatcttactgttcgtagaggaaaatggcttaatgttaacatatataaagccaaggatttcatcatacattatttttatcttatttacaatctttgtatattattatttctatgttgtatatagagaaagaaagtgaagaactttattataattttgtatactaaatctgtttaatataatattgagaatgtttactatatatccaatgaataaaggcgctcattctcaacaatatgtatatatgtatatatatatactttatgaaaaaaaaaatactcaatttttttatgatatataaaagagctaaatagatcatatatgcacacatccacttaacataaacatatttttcttatagattacaaattattatcataaaaagacaaatttatttggtttgttttataaagaaaaaaacaagaataaaaaaaaagggtaattttaattttcaaatattaaaatcaatccagtcaacaatttatatcaataataaataaggctatttactcaaaaacagactctttggtttgtgttgattcttaaatgtctattcttttatttgtacgtaaaattgatacgcaaagtcgaacacaataaaattttattttcacaacattcaaatgggccttattcttaaaagcattatacacaaataagcatgtaatattaattttctttacctacttacttacttacttacttatttatttatatacatatgtataaagacttaagcagaaccagagatgaagaaccacttatcgatggatttgtcaattggggcatctggcagtggagaagcagctgggatttcattagcagcagcagcagagaaggaagcagagtccttcaaagtggtgttagttaaagcaatacccttggaatcagcagccttaccagccatcaattgtttccaggattcattagtttctctgatgacatctaaggcatacttcttgttcttggcttcaccagagaaggcgaattggttttctggcttaccatctgggatcttgtagattctgaaccattcattagtagcctttagtaaacctgggaagtatttttcaacgtcttcaatgtcgtttaattttggagctaatggatctttaacgtcaatagcaatgactttccagtcagtttcaccttcatctaacaaagccatgatacctaagactttaacttgtttaatttcaccagtataagcgatagtttcaccgatttccaagacgtcaattggatcgttgtcaccaacagccttagtttcagcgtgggtttcatttggatcttcccaagtttgtgggaaagcaccatagttgtgaatgtaaccgtggtgtgggaaacagtttctgacaaatctcaacttacccttcttagtgtcttgaatgattgggttcaaagtttcttctttggtgatttctaatttagcgttagaccaacgtgggatttcaacaaccatgttaaaaatgttgttttctttgtcggcatatagtgggatatcatggaatggagagattggcttaccatcttcttcgatgtaaactttgtagtctaaggtgttcttagcaccaatttgtctggtagtgtaggccattgcgaatcaagtgtagttgttatacgggttggctttaacaggatttataaaaagaggaaactgcaactataaactaaacggacactaaagcaaaaacaagtcaaagatacaaaatgaagcaagacgaaaacagatatagacgcaaaaaaaaatattgagtttatgatctttcttccacttattccaggtcttttttaaatattactttatctaaacaattctaaataaaccattccgtgaatcatgtagtaagatcacaacctatgcaaaaattctattcaaaacagaaagatacacacatatctatgtccacacttttctgggatattttttctttctgtctttctattttttctttttccgttttgtaaatttgcctgtcggatttgtgaaagaaagcctcgaggaattctccaaaagtaacaaaaaaagaaaacaaaagaaaaataaaaacagaaaaacccagaaaaaaacaaaacttacaaaacccataacatccatacaccacaccatatatcttcctgtctctattatctttgttttctctttccggtttcactccatatcttaaactccaacatccaaaatgggaagttgtcactctggtgagacttttgaatttggatgcaggaaaaaaaagaacccttttattaaaagttcccaatatggcaaattttgtatcacaattaacgaattgtattggcacattctcttcccccctgaacttgaagaaatagccaaaaaaaaacatggctttaccttttttcagaggaccttaagttatatagacaaagtaaatgtcattagcttatatgaaaactataagtaaatcattagattcattaaataagtgtttacttaacaaagtacataaataagaaataaaaaaaaacataaagtcatacatatggatgtgtcagattatgtcactaagataaatcttttctatattattatcattcttagtaaaggcaaaaggaaaaaaaagaaaacaaacaaacaacaatatagatgtaaattgttttattctatcctaacacttatttttgagataagtaagcaacacctggtaattccttaccttctaacaattctaaggaagcaccaccaccagtggagacgtgggagatcttctcaacgacaccgtacttcttggcaacagtagcagtgtcaccaccaccaatgataacagtgttaccggcttcacaagacttgacgacttcgtctaacatagccttggtaccttcagcgaacttttcgaattcgaaaacacctggtggaccgttccagacaatggtcttagccttagcaatagtagcagcgaataattttctggattctggaccattgtctaaaccttgccagccagctgggataccttccttgtcggagacaaccttggtgttagcttctggagagaaagcgtcagcaatgacgaagtcaactggtaagacaacttcgacgttcttagccttagccttttcaattaactttggaacaatttcagcaccagccttgtcgaagatggagtcaccaatttcagtgttttctaaaaccttcttgaaggtgaaagccataccaccaccaatgatgatagagtcaaccttgtctaataagttgtcaatcaattgaatcttgtcagcaaccttagcaccacctaagatagccaagaatggtctggttgggttttctaaagccttaccaaagtattgtaattccttggttaataagaaaccagcagctctttgtggcaagtcgaaaccaaccatagaagagtgggctctgtgagcagtaccgaaggcatcgttaacgtaaacatcagctaaggaagataattgttctctgaacttagcaacgtcttccttggaagccttgaccttttggccgtcaacctttctggaaccttcttcttcaatgtgatatcttaagttttctaataagataacagaacctggagcagaagccttgcaagcggcttcaacttctggaccaacacagtcgtttaagaaagtaactggcttacctaataacttttgtaattcttcagcaactggggctaaagagtatttgtcgtttctttcaccgtttggtctacccaagtgagaagctaagacaacgtatcttgggttgtgttctaagacgtacttgatagttggtaaagcagcaacaattctttggttagaggtgatggtcttaccgtctaatgggacgttgaaatcgactctgatgaagacacgcttgtccttcaattccaaatcttggacagttaacttagaagataaagacattttttttgtttttttggtgtgagttgttgagttttatctcgacgatgttatgtcaagaacaagtaagaaaagaaaggagaaaaatttaagaaaaaagacataagaggcactaaggcgaaaaagtagcgaagctttcagacagctccaatcttacattatctccaaatatccaaacttgttgatgttttatatattgaacatgagagatttatctccccttgtatctctcataaacaaggaacaaagaaggacaaagaacaaaaaaaaacaaagcaaaagaaaaagaaaaagaaaaaagaagactgtaaaggtttagttaaaatcaacaacgtcaaacagcacgagtattatcaccatccatatcataatcaacaaaatgaaagtgtacgctgtgctatgaagtagttggatatgtgtgtgagtggaagaagaagtctacagaaactaagagaaaaaaaaaaaaagcaatggaagatgataaatcacctttaaacaaaaaagaaaaatttaaattattgaaccaccaaatgtgctttcaataatagaaacaacgtcaacagaaaaaaaaaaaatagaaaaaagcaaaatagaagaagctgtttgtgtcttgttatgaaacctgacgattaattctacaagaattcccaagatggcagttgttttacacatttctattaaagaagggtgaacagaaatatgattgtgtatctttcttttttaggcccacacctacctctactgttatgattgctaatgacatacaagaaatataacgcctaacaaattagcattcttctttttgtttttcaactctttgaaaaaataatacaaaatcaaacaataagttggaaaagcgttagtggatgcttcgaacttggccgaaaagggaaaactgtagaagagcttcctctattttctacatgtttgtcttgtgttctttaaaaaaataaaacagaaaaaatcacagaattctgaattttagactcaatggtacaaacatacaaaagaaccctaagaaagtcttcaggaagttttcaaatagacacgagggtttaaataagattttagaataatttcaatagggttactaattttcaattaggatttttaaacctacgaacattatttttaccaactttcatcttccaatcatatagaaatttaatattcacatattttgtatcaaacacatcttgtctgcattatttctttttataaatactgattttaatgctacatgtctacagtacgtttaacagtacgttctttgtaaaagtatatctagaaataagaccaaaagggtttgagatgatattatattacatgataacaatagtagcagtcttaaactatacttaaaattaagtaaagacatgtatttcattgagagtattcatcgttggctgctttcccttccaggcccttattataatatacttgatgataaaatgcttatcttacagtctcttgttttcacttttcttctttcttttttttttttcctttttctcttattctttctacatcaaaatttttaaagataagggtaaaaggtgcatacattctttttaccttcctttttttgtaagatgcaacataaaataaatactaatggagctaaaccaatcaactaactaactgacagtgtcacatagttgatacacttagtatctgtgtttaatcaataatattcaattatgtattttattggactgttttatgtcatatcctaatggttttaaagatccttataagtaaaaagataataagagaacaggaaactaacttaaaagataaagaagaaaagacaacaaatgataattctttggttgctccagatattattagtactttcccttcaattggaatattctgactgtcaggaggttaatatagcaaatataaaacagagaataaataaattatacgactctgattactcattcgcacctgctttaaatgatccgtttgattatccgcatggttacaaaccaacagaaaacgataaatgtccaccttgcttcaattgtatgctacccatgtttgaatgtaagcaattttctcgttgtaatgaatataatggccgttgtgaatgtattgaaggttttggaggtgatgattgttccttgcccttgtgtggatcgttagaagatcgtaatgaaaaacgaccaaatagatctaatattactaatacatgtgattgtaaacaaggatggggaggtatcaattgtaatgtctgtgaaatggattctgtttgtgactcatttatgccggatgagtccttgaaaggtacttgttacaaagacgggatggtcgtcaataaagtttatcaaacctgtaatgttacgaatactaaaattttagatatactaaatggtaaacttccacaagtatcattcagttgtgataagagtactcaatcgtgtaattttcagttttggatcgatcaggtggagagtttctattgtggattagactcatgttttttccaatacgatctaaaaaataatgtgacccattattcttgttcaaacgcatattgtaaatgtgttccaggaactatgctttgtggtgccaatggttcaatagatattggtgaatttttaacagaagaagttacaggaccaggccaatttacatgttcattaacagatagaaattgtaagtttaacgaacctgcaatggatgatttaattcttcaaatatttggtgattcacagatcgatttaagctgtagatctggtgaatgtttacattatagtgaaattccagggtacaagagtccagcggacaaaattaatgatacctggcaaggaaaactagttttggctctcacatcagttggtgtggtatttttagccatgattacaatactctatatctccaaatcacctttgttcagagaaaaatttgataatgataatagtaataaccgttatgggtatattaaattacctgttaatggcgagaatagtgatattgatagagaaaattttctgagaaatgataaatcctctactttaacatttgagaatatcagctataaagtgacatcccttagtaataaccaaaaagaacaaagtatattgactggaatttcaggaatggttaaacctggtgaaattatggctattatgggaggttcaggtgcaggtaaaaccacattattagacattttggcaatgaaaactaaaattggaaaattatctggtaatattaaattaaatggacatctgatcaacaggaaggattacaaagatatgatcgggtttgttgatcaggatgattttctactaccgactttaactgtttatgaaacagtattaaatagcgctcttttgagattaccacgttttatgacattcgatcaaaaaaggcaacgagttctcagggtgcttgaggaattaagaataatggacattaaagatcgattaattgggaatgatttcacacgtggtattagtggtggtgaaaagaggcgtgtatctattgcttgtgagttagtcacttccccgataattctttttttggacgaaccaacttccgggttagatgccagcaatgcaaataatgttattgattgcttggtaagactaacacaattgtataatcgtaccattgtcttgactatccatcaaccaagatcaaatatttttaacaagtttaataaattagtactgttaagtcaaggtgaaatggtttattctggtgatacaataagaattaatgaattcttatacaactgtggttataaaattccatctaattataacattgcagattatttgatcgacattacctttgataaatctccaagggaagggggatctgaacatagcattaatgatctagaaagaaatatcaatattcccgaaattcaaattaattcaactcagatccaatctaccatgagtagatctcatagttcatcagaggaattacgtttacaagaagaatgggaacactatgcaacacatcgtgatgaattaagaagtatcctacaagatgatactgataatttaaatcatgaagtcaatgagaatcttcgtctttcaagaaccatatctgaacacttacatgttatatttcaaaatggaccattgtttcaagaattaatcaatgatattgcaagtttaagtccacgttcaatggaattaccttcattacgtacaactgaaataagagcatccttttatcaacaactaattatattaagttcacgttcttttaaaaatacatatcgtaatcctagattattgatggcaaattatttattagcggtcttattagggttatttttaggaatgatatattataatgtcacaaatgatatcagtggatttcaaaatagaatgggtcttttcttctttatattaacatattttggattcatcacgtttactgggttgtcctcattcgccatggagagacttatatttttaaaagaaaggtctaatagttattacttgccaagtgcgtactacattagcaaaataattagtgacattttacctttgcgtattatcccaccaatcatcataactattattgtatacccattagttggattgaacatgatggaaacaagcatgatttggaaatgtatgttaattctaattttgttcaattgtagtatttcaatggaaatcatgactgtcgggatagtttttcatgatttaaataattccattattgtaagtgtagtaattttattattctctatacttttcagtgggttgtttatcaatacaaaggatataacaaattattctataaaatattgcaaaaatatatcaatattctattacgcttatgagacactattaataaatgaagtgagaagtttgatattgaaggagaagaaatatggattgaatatagaaataccaggtgctaccattttaagtacgtttggatttcaaattcaaaatttcagttttgatattaagatgttactattatttaacgctttatttattctgttaggatatttggcattacgtttgatagtagttgaaaaaagatagtaaaatactatattggatatagaatgtagatattgttcaaatacataagcattatatagcggtctttatgatattggcacttaaagaggtaactgtcatgtgtgtgtatgtctgttttccttcttattcactttgtataaaggtaaaaagaaagaagtattttagtgagatgcgatgaaaataaaaaaaaatttattataagaaaaataactgacaaaaaaaaataataaaaaatgtttagtgagatcaatctttaaatataagaaataaaaaaaaataatagaaaagcagctagcttgtaaagagattctataatattgtatttgatctgataggtaaactgatttaaataagaggagttatatcatccactttttattaattagtgctaggaataataatagtaataataataataacaaaatagcagaaatatttagaataggtaatatagtgaataatgaataacaacgtagaactaagtgatgtggctagagagttacattcccacatgcttcgttctaataaggatggatctaagttgtttacccaaaaagaacttcaagacaagttacctggtaataatccaaccttagcagatttgatgcttattgtacaagaactgttggataagaatttgattaaattagtgaaacaaaacaatgaattaaaattccaacccgttgatttccaagaagccgccaaaaagtccacaatgtccaatgaagaagcattagtctattcatacattgaggctagtggccgtgaaggtatatggtctaagactattaaagcacgtactaacttgcaccaacatgttgtcttgaaatgtttaaaatccttagaatctcaacgttatgtcaagagtgtgaaaagtgttaaatacccaacgagaaagatatatatgttatatcatttacaaccaagtgtagaagtcacaggtggaccatggttcactgagggtgaattagatgttgaattcatcaattcgttattgactattatatggagatatgtagctcaaaatagtttccctaatgggttccaaacggtggtaggtagaaacgataacagtaaaaacggcgatatcaagaagaagagtagtcagtattcaccacatgtacgttcatattctacgacacaagagatattagactttatttcgtctgcaggggtggcgaatgttgaattgagcactgcaaatatacgttctttatgtactgttttggtttacgacgatcgtttagaagaagtagagtttgattgttatcgcgctacattaacctcagttgctcaattggtggggccaatagatgagggaaacacagcaaagaatagtaagaataaattgttggacgaaatggacgagttttccatctttgattatcatcaaaccattgggccttctgaaaatgataaagaggctgtttatttcgatgaatgggcactataacctcatgtgtgatagtatacatgtatgttgtatgtaaacttttgaatgtagtatcatatgtataaggcatagttatttatagaccaataacaaaaatgcatttatgtgataaaatatccaaggttgagactatggcactattcttttcgagaaaataagaatatgtcgatgatctgttttctctctcttcatctttgaaacaaaagcagtttaggctcaatggagtaatcaaaaaaataaaaataaaaataaaaaaattgagaaaagaaaagaagtctaataatagtgaatggtttgggaaacaccatatagatggatctagagattgccgtcttttctatctcatctcccttattgaggcatgcctattacaactcttttatttgttttttttttcttctgtttaaatattcttggtgtcatttgaaatattatcttgaatctgcctttaatttcaatttttaggtaaacaacggtctatgtatcagagttgtggaaagggttttgtttttgtacaagaagatgtcttttttttttttggtagatcagtaattctaataagaatagggcaccaaccaattttgtttggaaagagtagagcctttttattctcccaactttttttaccataaaagatacgtgttgcatggtatatttgatattagcagtgagtttacaattcgtttaaaatagtaatggaaggttttttttttctgcaacccaaagtggaacaaatcacatggagttagtgtgaaatgataataaatatatataaaagtgcagacaatacaataaagagatagaaaagaatgtttattagatggcttatgtcctttcctcgaatatttggggtataaggtaaaaataaatagtacactttccctcttgcactacttagatctgaatgatttgattctatttcttaatgtttcccaatggtaataaacacttctcaatagataaatcgtgttataatcttaaacaagcacgtatatatgtttatggaccaaaaaggaaattcccgtgaggaaatccggatgaaatgagagattcttttgttgttttccattttcaataatcaaataaaaaaggaagaaagtgtgattcttcattgaacggctgtttttcatgagttgtctttcgtatttcttgagagatatgtgaccataacagatgacagtcgttggttggctggacggttggttgttgtcttttccttccctttttttcttcttcttcttcctcccttttttttattgttcttgaaaacttcttttgttattgaaaaacaaaacaaaaaaatgagtcctccggatctgttttttttttctttcttgttttataagagaaaaaagacaaaagaatttttgtaaaaaaaatgcggggataaacaataggttcattattattaaatttgaaaaaaaaaaaatagagagaatgagagagaaaggccatatacattcctcaaattcctttggagactttttcattcaaaatagtgatagtaagactgataagaccaatattctgttatttgataggtgaataaaagtcaaagatagaaatattattgaacgcttctctttataatgactgatattttacactaaagaaacaatatgcaaaaatcacattcgaatagcatttgaaaaaatacatcagtgtcagctatattcttttaacactgtgtctgtaaagaaaaccgtaataaaaaatttgttatgaccctcctgtaaactaacttgttgtttaactttttcttttttttttagtttttactggacactggcaataatagtttgattaagaaaaacaaaagagagagggagaatgcatccaaacttgagagtcgtcgtaattgacatgttctaatatgatttcttcgattcgagaggtatacagaatatatgtaaatgaaatgatttcaagatgttttctgtattaaccctcatttctattaactgtaatcattgactaaacacaaattattgttttcttgtccgattttttttctgaacaaaaaaaaaatgtcttaatacattttcttttttgttttactgtttaaaataacaacattgtttgtcatctaccgcattgtattctccaatgtagaatggagtaacggagatccaacggtaatataaaactaaaaatggaaattgccatgctagtttttcctatcttataatttttattcttgattgattttgttggagaaacaattttatatattttcctttttcttccttacatatggatgatactgatagtgatgttatagttgttgtcatggcagttgtaatagtggcaaagaaaaaaaaaaaaaaaaaataaaaaagtaccattggtagcaacagtagtagtaagagcggtgttggtttgtctttattgataatccccaacataacttatattgtctactcttattatttcttcaattgatatatcaataaaagcaaagagattaaatttaaaaaaagaattaatggaatttgttttgatttacatatataagggaaagatacgtttcaaactgtagatagccttcctcttgaaaaatttctcaagttatcttatcctatttcagtctgttcacttataaagtaaaaccaaacgaaaaaaataaatattaggaactactaatattataccttttttcctctttccatcgaatatatatatatattaatttcttctcgatatattaaatagagtttaaagataaaaaataaaaaaataaacaatgtctgacaaagaaatcacttctgatgaaccaatcaactctgtcgatgaagaacaacactccctttctagaatttatacttctggtgcaaataacaaatatatttatataggcaggcaaaaatttttaagagatgaattgtatgaagcctttggtggaacgttacaacctggcttggctcctgctgcctctcacaaatttgccaatccagctcctttaggtttgtctgcctttgctttgaccacatttgtcttgtccatggccaatgcaagagcccaaggtgttagaactccaaatatcgttgtcggtttagctttcttctatggtggattagtccaattgattgctggtatctgggaaattgctttagaaaacacttttggtggtactgcattgtgttcctacgggggtttctggttatcatttgcagctatccatatcccatggtttggtatcttggatgcttacaaagatttagataatgatgacttacaaaatatgttgggtttcttcttacttggctggacaatttttagttttggtttgactttatgtactttaaaatccacagttatgttctttggcttattcttcctagtcagcatcgttttcctattattatccataggtgagttcactggtaatgtttctgtcacaagggctgctggtgttataggtgtcattgtttcacttatagcttggtataacgcatatgccggtgtggctacaaaagaaaacagttatttcttggctaaagctattaatttaccaactaatgaaagaacattagtttaggaatagcaccagccaaaattatatagtagtgataatcaagctgaaggtgataaaggtggtttatcaaaaaaaaaataattttttaacatacaaataaggaatttcatgttttacacttacttttaatctgcaccatatttcttatttatttatttactttcttttttttttggtgattagatattccccgtactgataatattcgtttatttttttatatagtttatagcttttgattatattcccataaaccttttaataatactatagttctgatgttctgtaatgaaaatcatcccttttagtttttaaccctttgtgtaaaagcaatatatatatatatatatatatgagctggtgatatatatttattctagaatgaatcactagtattatctactttttataatctattaaatatctaattctaattcttctaacaatttgtttaaaaaattttgtgaattaaaaatgaaatctgtgttattatctggattcactaatagattactattattatcataggcatccgtgtttatgcctataggatgattatttatatgtttgttatcattggttaaatggatatgactattatggctgttattgttattattattgttgtttacatgttccacaaaggatgtatcatcattttggccacttacacccacaaaatttatattaaaatagttgtgatagttactattgtttgtagcatgattatcactgccttgtaaggcacctatccggttattatggtgatgattaacattaaatttttttgttatttggtgatgaatactatgatgatggttattatttttaaaatattgcaaattgttaatcaattgttgatttagctctaaaaatttatcattgaattgtttgaatattaattctagaacttttaaaattcttttaccagcactcgaataattttgcaattcaatcaaaattttataacctaaattacaaacattttcaatttcacttagtttttcatcattgggatttctacgttcttttaattggtatttataaattgttaggcatgcaaaactgtaatagatagtatgaatggaataccaataggttccactaagtaaatccatattgatcatatcatatgataggcgaataatttctattgatatcttgatacaattagtagacattctaatttgaaacttcaaattgggataatcgtcagaattcaaagttatgaaatggaaaaaaggtttataaagagtcaatttagttaataaaaagtctaactgtaacaatttctgtggctttaaatagtaatccctttcgtcatctgtcttcatcttatatgttggttttaaagcagatggtagttgtttataccagttttccagttgtaattccaagtcatgaatattttttattaattctgttttatgtaaaattttggaaagcgttaattgtgaagtatagtcatagattctagacatcaccaataataatttagtgtgttcattgtttataccgcaactacttatcttttcaaaaccagttttatttggagattcaatgattccattcggtgtgattctttcatcgtccacatctaagggcagttcttgatcaattttatcctcattcatactagaaggcaaccctagaatacaattcatatatatatctaccttatatatagaccagaataatcttttttttgtttcattttcaattggtgttgggcctgtcaaagaagaatttttatacaaaccttcctttattgcacttcttaatgcaattccaatataatggtaacacgactttaaattggcagaacattgtaaaaacaatgttaacatgaaaagggtctgaattgaatatagatctgaaacatcagcaaaatcaatcaatgatttcgatttgatgaaaaattttaagccttcatcaccataatattctttttttatatttgaatcatatgtctccaaatgatcatcttttgaaaatagtgcacccactgctaacacagcatagattaatgcttctgctctgctctcgttaatacttttggggtatccgttatcttcatataaggaatataatattttaattattgtaggtctatgatagaatctaaataatacacatgcataattccatgtcttcaaaatcaattttaatgcgatatgttttggtggtaaaatagattgattgatcattctaatttcatttagatttaaaaaattatctttgttgatattcttatcaattgattttattaaaaattcgttgatatccttcttcttgtcattttgatgacaatatcttataatattttgtaaattttcctttgtgaataaagtttccactattcttttataatctatcgtatcatgtggatatactgtaggaggtgagtgggatatctttttattattatcaagcaaaattctagaatgttcttctaaagattcttctgcttgttcactgtgaatagaattatcaaaaaatgatggattattatgctgtgatttttcaaattttgaaatattgtttgatgtatatgtatcagagtaattattttgtattgaaacagttgttactgtcaaaatattattactttcgatgatattattctcagcctgaatagagtttgatatttttttggatttatttagaatattattcatactattagtatctgtggtatttggatttgcagaagaagaagttaaatattcacagttcaaatgatttctatggcaatataaacaaggttgatttccatcgcatcttctcttcttttttctacatgaaagacaagcaacagcaaccctaattcttctgggtgttaattttctagtctttaaatcagttgaaagaactaatattttaggtttctttgtcataatatgctaataaccactattatatttgtaatttttgttattggaaggtttattcagtaaaagtgtttgatttttattatttgaagacctgtgtctcttttcgtatatgtaataacttacagtacccaatccaatagcaattaatgggtcccaaactttaccaaataaatatggtgcgtaaacagtagtcatgaaatagaattaaaaaagatagaagaaagagtcagtagtattacttaaagtttgttatagaagaattatagaataacttttttttatcaaacaacgctatatttgatccagctccaataaaaatttgtctatatcaaataacaacaaaattaatttatggaatttatatggtgttgtataattctttaacagacttcacaactatatatataatagatatagtgtatacgtgaaactattttgaagctctatgaatcaattatagtagtaagattattttagacttgttttaaacaaactgaagattatttctcgaagtgatatcatgcgaataaaacaagataataacgtttcaaaatttgtgaagaacttgtttagccactcatttaatggcaatagcatccaggacttacttgcatttaatgatagcggaagataatttgcttccaggaaaattcattttgatgggttcgtgttgtgtgattttagtctgatcccatttttattttcttagtattattttgtttaatcagcagtagtacccatttctttttatgttctgtgtgtagtgcagtattgttattattagaatattcatatttaattacagagatacacaataagttggagatgtttagaatactagcaaaatctaatatacctcaccatttactgataaaagtaaaaatgcagtctatctatctaaaagtttattttaatgttttcatatggttagggaagaaataattgtttgtgataaatctaccatagataataaaaataataaaagatctaatctattatttttcatattcgtttagtagttaaaaaagtttttaaaacgagaagtaattactgtctaatggttctttttctggggttcacaaaaaaattaattgtattttataaggctaaacagagaaatgaaaaatataaggagtttagcataatattttacagtttagaaatatacttttgggatattctaatattagttacatcaccttaagtcatctatttagtctggcctacataatttattcttttatgaaagatattccagtataatactaaatcgaagattaaattcaattaataatattttccgtggaaattataaaaacatgaatttctttgaccataatcaagtgaaaaaaaaaatctttaacaaacatctgttcatgtatttagtgtatacagtataatttcagctgttactatgatgcatgttggaaaacataataaggttcgatatattagaataatttgaagattttatatagaatgggataaacctagatctggatttgggaatatatacaaaaaataacttctgtagatatataacatgtaatgtatataagttgtacttgttactagtattgataagcattgttttgttcttcttatcaatgtttataaacacgactgaatagatcacccaaaactctaatatttaaggatgtcaattaacatcgtataaaaaagattttgttttccagagtatttctcctctgttcagtaaaactttgttctatttataattttgtgtactttataaagattgttttcttctatttttttgttaaccttgtgtatagaatcgtttataaaatccaaatcctttttattatcttaatagtaaacacgttaaactctagaaaaataatagttctatgcaagaaaattagataatatcagcaaaatattcacatgatgatggttcttctgatatctttaatacattaatatcaatatcaaaatgttgcatgaaatctttaaacatacttttttcacttaatatttgggacaatgagggttagtaatattttattaactacactcgcatgattagattaatagaacataaatcggtataatattttctaagaatgtatataaatatattacttagcataaattttattagtgcagtagttttttaaatattaactctaaaagtacagagtgagtctatatgttatatttttccaagagggtcatgaatattattatataatgaatgttattaaaatatgataaccaagtggttattgtaatatttcatattgcaaagcaaatatggttgtaatgtattttttcaatttatttgtttaattttgtttttgaaacgcgtcattgttgtagaagagctttttcatgaggtctgaatttgcgagatatatcgttttgaaaagcagtaaattaaacatctatatttattttatcttagtttctaagtaaattgggcctttaattcgataaaaaactatgtatttgttgggaaatgagagtttattactgtcatttccataagaattatttttaattagtttttctatatattatgtggtgtacggatgtacataatatcaggaaaacattttaattgtcaccaaatatgtctttcgaagatttgaaaagaaatgaaaaactttaaaagaaaacttaaagtaaataaaagaatgtatactgaatacactatataataaatatgtacaggtatttaatacaaaaacataacaagtatctataacttaatgatgtctatcattaccatggacgcagaaggctccaaattccaacaagcatctatgacttaatgatgtctaccattaccatggacactgaaggctccaaattccaacagtattgaatataagtaattttatttattatgtttataaccaagtacatattaattttttataattttaaatcgtttctcaaaatatttcttcttttgaaaaaaatttacagacagcctattaaaaatagttttaataaggaaaactagtaggcatattattttccaacaaagttcacaaaataaaactattggaatttgtagcacttaatattcatggtaatagcagacgtcattaagttatagatgcttgttttattttcgtgttaaatatatgtatatatttattataaggtttatacttttattttccaacataattaataaaaaatgaatttataacagctgttggaaatcatccaagaattcaataaagaaaattaatttacagttttgaaaaggtatttctatcaataaggaaaggaaaaaacgatggccgttccaggtgtctttctctactgtttatgtgaaaattatttattagcacataatttactgcttcacaacgagttaggccttgttggcgcaatcggtagcgcgtatgactcttaatcataaggttaggggttcgagccccctacagggctttcttttttatttcgtgactgtaatattcctgatattactgtttagggtttgtttagaaaaaagagggttgacaatatttttctaaactttcctttttgcaaaattttacaaacatacataaaaacaggagtaaccaacataagtacaagagagcaaccaagaagaaaacaaggaacaaggaaccaaggattacttaagtttagatatatggcatataagtgtatgctattaggatatcttagattaaggatctagatatatagatatataggaatattacatctagagatatagaaagagtgtatattttatatctatccgagtgaaatattattgagatttcaacaagaattactgttatcagaaacacataacctcagggttattacaactatacaaaaaattttaacaacaaaaagggggcgagctgggaattgaacccagggcctctcgcacgcttagactcttaaaggaacccaaagcgagaatcataccactagaccacacgccccgaacaatcgctcaatgttgtggaatagaatagttataaccatcaagattacataagatcctgaatgaatctagaaccaattagtgtattaataagccatacatgtgctacaacattagatgctgcataataaaagattggattacataagatcttggcaaatctagaatttacctattgttttattaagtcccacgtgtattactaatcaccatgattagagaattggggtgcagttctaatccaccagtgcacctaaattaatgtaaaaaattttagggtttgaatcagtcaagtcattaatgtattaatctgaataatcgatcgagctccagaaaatacataaaaggacaacgttttctggagataaaaaatcatcttccatagccgtttcttgtaaataatttatatattatatatgaacaaaaatagaacaacaagcaagtaacaagccaagtaacttcgaataaatatattagcttgtcaaagccgctcaatatataagaccgtttcagtaattatattatcgactatagttgattactgtctcgattatttgaataactgttaatattatttgcgctcccctggaatacacaaagaatttcaccatctcatactacaacatttgttgttctaatataaaatggttagattcttttgtgtatttcgggggaaacgcaaataatattaacagttattcaaataatcgaaactgttggaaaatgagagtttattactgtcatttccataaaaattatttttaattagtttttctgtatattatgtggtgtacagatataccataatatcgggaagacattctatttttcaccaaatatgtttttcacagatttgaagaaaaatgaaaatcttaaaagaatcaaagtaaataaaagaatttatactgtatacactatataataagtatatacatgtatttagtacaaaacaaaacaagcatctatgacttaatgatgtctaccattaccatggacgctaagggctccaaatttcaacagtttcttttatatttatataattattaattcccaattaagagatcgagggaaaattactctacatattaacataataataatacataataataacatataatatgatcaccgacgctaaagacatttatactaatattattcattcagaggagtttcttgtatagttgtttttgtgaacaagaggtcgaatttacttagctagttagttataataaatataaatatacatactatgtaaagaagagggttagcaattttattaatagttaatatattaataataatatcaattaatcatggccattaattttattattattttatcggttttttctcggaaattgataattttttctagttaattcttcgaaaatttatatatgtatttgaaatttatttatttttagagatacattttttattatgtaccattaatgaactttaaaatttttaaactaaacccaaattaagaaaaaagaaaatacaaaaacaaagttttataaaaactacataaactttactctaaatgtatttgctggaatcgaacgttctagaataaataatagaccaattagattttagtaaacattaattgataagcaaaaagtggaaaacgtattgtttgcttatcaataaacgtaaacaaacttcagcataaatctggtgccgtacatggatgagatgtgccggatataaaaatatataaagccaacatttttttcatatcatgtttcttcccttgcccatcttctacattttatcattatacattatatacatgaaaaaaaaccgaagaactttattataattttgtatactaaatctgtttaatataatattgagaatgttcactattgataagaatgagcgcctttattcattggatatatagtaaacattctcaatattatattaaacagatttagtatacaaaattataataaagttcttcggttttttttcatgtatataatgtataatgataaaatgtagaagatgggcaagggaagaaacatgatatgaaaaaaatgttggctttatatatgttaacattaagccattttcctctacgaacagtaaaatatttaataaacaaactcaacaacctttggtgacctctcaacaattattacacaacaatttatcgtttagtgtctgctaaaatcttattgttctatctatttcattatagaacattttatttcaacaactatatatccaatgactacaggtactcattctcaacagtattataatcatatataatggaaatgccacacaattatacagataatttgaataataatcattgatgagctttttaaacagagattaaagagatatttgacaatgtaaattcatcctattaaatgactgaaaattctatatcagcttataaaagaagaattaaaataaaatgtgttataatgtatattagttatatatgtatactaaatctgtaaaacagaaaaaaatagtaaatacaatataaaattatataatattataaaatgatttctttttgaggattttccctcaattttttttctaggaaataaacaattaaacaattataaataaaatataaaaacacactgtatatatattcttcattcaggtttaaaaatttaataaataaagttgtccatctatatcctttttacttttgaaaatcttttcataatttcttttataattttgaaattttgtgaaatatctccacaacattggattgtgcatggcacacatttcttttctttgagagaatagttcactttttatgtaggtaggaaatcattctagaatgtttattattgaaaaaaaataccaaaaagaagattttcagtaactcatcaagctatacaataattctacatacattttccttttttaatataatcaaaatataaatccaatatcatattcaatccaacatagtttaatttcctaatgtagttcttagagacacttctttatatttttcgaatactaagcataacaaatgagataatttgacaccctatattatattttttattcccacatgtaattatgcatatttaactgcctatatcttataccactaatgtaaaaatatttttagaacatatcacatgactcggataataacacaccatataactaccatatgtccactaaaatatattaagacgctcaacatatatctaattagtgcaagtcttggaacacaagtaaaaaaattcacctgaatacaattcttaactacaacgaacaaatagcaagcaaaactttatggcttaactaacactactaagtgtttgaattagcacatatatatcaatgtatatttcaaatggtgattaagcataaaagaagaggtattatcgaatacaatcttgtttgaactttaatggtgatagactatattaaagttaaaaaatagaaaacaaaaaatcattagtctctaactatgaataatagtaggcaacggttataagaacaaattaaaagaactattttctaaagtttcttcatgattaataatttttcactttatcatactgtggacatgtgctaattttttttacatatgttatctattgggaaagccacacagaactttatcagtacttattttacatatagctgcaaccttaattattgatcatatataccaatctcagtgttatcttatacaaatctgctcatcaccaatgaagaaaagatgcaagcccctctaatacacccataacggatataacttatctttaaaagacaaattattcctcactattgacgtcattttaaatttttacctctttcactccagttttctttagaaacaaaaaaaaaatttttttctctgccatcaaaaccagcttttccaaaatttagctatcaaacaaaaaaacgaaattattagccattcataaggacaaatccctgtttaataaaatatagacatttatatataaaaagaagaaaattttatattcgtatcataacaagcaggtagtatcacttcaaactatttgatatttccacatctatctattctgctactttcaaggcagctaattgctcacaacaccatcataataaccattctatttacacatttttcatatatggatcctggataatttttcttcttccttatttttttctttctagattcattgatataaatctgataaggatatattccctcttattatcgttaattaaagtaagatatcaaagataaaaggtatctgaactatatagagaaatttttatcacagaaaaaataattgttatatcaaaagttatcagttcaaaaaaatagaagtgaccatacgcgttatataatattatctaaaaaccctttctgtccttttgtttcccttttaaattattattaatcatacttattaaataatatatgccatctattagctcaaacgattctactgttagtctagaatcaagcaattctattgcagtctcttctgggagttctttaggttctatgaacacaagagaccataatgaactgtatgaccataggcaacatcctgattttagtactacaatagagaatcaaaacattgctagaaatacaaacagtgataacaataatagtacctcaacgaaacatcaacttacaaatataggtgtcaaccccaataataatactgaaactgttatggatcctgttatgttagacaccatatcgcatgctatgaataatactgcaactattgttagtaaccaggtaaaattatcagaaaatgttggtgtccatcatcagacgaaaaaaccacatgttgctttttcaaatgttacaacagaattatccaacgatacaaaatcaccagttatacctttgtcacatagatatcgtcgtcattctcatcaatcatacttaggaccacctatgcttccatctttttatcaaaacctacatagcaaagctgatccagttatagaagcagcagaattagctgcacatcagtttaattctatcgcaagaccatctagattagaacattgtattaaattcgaagggttatccttacatcataattcagctgataatggacacggtactcaaagtggtactactgttccaaccgactatacatcattggaacataaggacccactttttaatattcagaaacatagacaatcttcaggtcgtagattatcaaaaatccattccacgatcgattcaacatctccaaaaatgaataagaaaaaaaaccggtctgattcactatcttccacacgtaatttttctgagaatagtaacactaagatgaatcaattctctgccgatggtcatattagttctaataatattgacaacaacaatgaaagtactttaaaattagttaaaactaaatccagtgacagtaataatgggcaaggtttacatagaaaaactacaagaggctcttatgatagtgatgattcacaaggctctagagacacacaagaaacagaggaggatgtatgttttccaatggaacctcaatctcactctcgtattaatggaattgatttcgatgaattggaggaatttgctcagtatacaagacaaacgaaagaacagtacttgggatctatgcaaccatctctatcacataataataacgatagattaaatggttctacttcatcgagtatatcattatcgagaatatcatctgctgctttaagatacactccaagaccatctgctcaacaaccagtatcctcatcaatttctaatagtttagagagtaaaagagatgaggaagaagaaactgagaaagtttcttatgtgagtccaccaacggacagccctggtgtacagttcgatataagaaataaaattgaaggcgaggatcttaataaaaatggataccaatatcactattttaaccaggattataccccaactgattacagcaacaacaattttgtaattcccaataggttttcattcttttgctccgattctgaggaaacaatccacacaaccgatattgcctctttagtagcttctggtcaatcattttacgatttatttagaggtggtgagcctacttggtggttagactgttcctgtccaacagatgatgaaatgcgttgtattgctaaggcttttggaatccatcctttaactgcagaagatgttaggatccaagaaacaagagaaaaagtggaattatttaaatcttattactttgtttgtttccatacttttgaaaatgataaggaatccgaagattttttggagcctattaatgtttatattgttgtctttagaaatggaatcttaacgttccattttggacctatttctcactgtgcaagtgtgagaagacgtgtaagacaactaagagactatgttgatgttaactcagattggttatgttatgcattaattgatgacattactgatagttttgcccctgttattcaatcaattgaatacgaggctgatgttattgaagattccgtctttatggctagagatgtagatttttctgctatgctacaaagaattggtgaaagtagaagaaagacaatgacattaatgaggttattaagtggtaaagcagatgttattaaaatgtttgcaaagagatgtcaggaggaggctaatgggattggtcctgcactgacatcagacataaacatcgctaatttacatgctggtgactattcagatggtcaacgtgttcagcctagaggcgatattgcaatgtatctaggtgatattcaagatcatttactgaccatgtatcaaaatttagcagcgtatgaaaagattttttcgagatcacacacaaattatctagcacaattacaagtagaatcatttaattcaaacaacaaagtaaccgatattttaggtaaagttacacttattggtaccatttttgttccattaaatttgattactggtttatttggtatgaatgtcaaagttccaggacaagatgcatcaattatttggtggtttggtatcttgggtgttttaataggcctagcaatcggtggatttattttcagtacatactggataggaagatttacaccacctacgactttaaatgaggctgctgaaagtggtgccacttctgtgatcccaagtatatttggcagaggcagaggtaataagaggcacaatcatactgatctaaaaataaatccaacaacaggctctatcaacagtctaccaagcagattaagtcgttacaaataaaaaagaaccaaaggcatcacagctttagtcttatttactaaataatacttaatagttatttgacttattttcattttatttaatcaaataacaatgatctagccatttatacagtaataccttcttttgtactaatttcaacaagtataactaataatacctgttatatttttttgtatattctaatcaaatgcctattacatatatatatatatattttcgacttatttggtctttttaactggccatcgaacttttgtcggactgaaaaaaaaactatgtttgccatgagataagagtgataataaaagtttaggagcattttagcaaagattgtagagaaaaacaaacaaaacgaatcatgccaaacaaaataagttgactcgatatgcataattaacctcaaaacttctaaatagaactcattaaacgattttatattcattaacctttgttttctaattttttaaatagttgaaccttttctttcatatacttcctctactactctccactttttaaaaatatagtaaccattcccgaaactataatcattataaaatctaactataaaactttaatggactacagtttatccataagacataatccaacatctcattatgccaatatcacttctggatattatacatttctcatttgttttatatttgcaatatcagttttcctagtacgaaaatatcttccaaatagatcaacacagagatttgtcaagattatctataaactaaatccagcatttttagcttgttattttgccaccacaattactctaatattattttctaccttctttacccaacaggagcgcgttgttagtgtgtttacaaaaagattaggaagaattagttatgtttttaccaacctgctcattataataatgtttcaagaaccattatccttattcaaagggttagcctcatacttagaatttatcaatctacacaaatggctgtctcgtgcggtatttggtttaagtatattacatagttttatgttcataggtaaatggtctagtgatcctgctatttcaatttggaataaattgattgtgaagaaggcaaattttattggatttgtaatatttattgaaatatgcttcatgttagtaatttcattaaaacccatgagacaaaaatcttataagttattttacttttcacatcaattaataaatttatcatttattattttaataccatttcatgcaagacctcgtgtcactatcccatttttcgttatcaatttagtattgttgacaatatattgtgtaaataaagtcattagaagtagccaggtaatgattttaaataaaatggaagtccctgaaagtagattatatacagtaactttaccagcaagtagtctaggtgatacttctgtaatttctcctggatcacacattagaatcagtccatattcaatatggagttggcaatattggttattgccatcccatccatatactattgtatcatgtatgaatggtgaaataaaattgatcatcaaaaaaacaaagtttgaagtgaataaggatgaaacttatagaataagtggtccatttgaaaatatttccataactaattttattaaatggcaagaagatttaaacaatattattcttgttgctggtggtagtggaatatcatttattttaccaatttatcattacttgcaatataacagatattctataatatcatatagatcattaaaaatgatatggttagttaagaatatttctgaattccaacatattagagacaatattggattgccatgtgaatattttaaacagatagaagttttcatcactgctgatactgaaaggaataccaaaaataacagcgttaataatgatgtggtgaattttgcaaatgaacatcgagatgttattgagctacaagatttcattcccattgaaggtaaacttgatactaatgaagaagcagaaaataatattaaatatggtagaattaactgggagattgatttttttgaggatattttaaataatgattgtgaaaacaatagtaataatacaaacaattacattattggatgtgggccggaatcattaattcaagactgtatagcgtttggcattcaacataattatcaagtgattagtgagtattattccttatgacatacactatttatgataataattcctactgaaactaaagatacataacaaatggaaacaacaataagattatttttaaaagggaaatcttacaacaacatgcaattatcaattatcaactatagcttattattatacagatagagtttgatatgccaagataacctgtttaaaaccaaaacaatcaagcaaataaaatagacttgattatattttgtattcagttgtcattataccaaaaaaaaaaaataaatgggtgaataaataataaacagtttctcttaaaagatttcctaaaagatataaccctcttatcagacaggtacacatcacactgtaaaggggctttattctttttattatattttttcatttattcttttgttattctcagccacttcatacatttaagtattttgatgttacttatattgtttgttatcttatcttcattctatattcttttttttttatcacatgaaatattagaatatcagactcataaataactatttctattcttcacctctccacatataacatggacttcttatcaagctttatgatgcaacttcatagaaatatctatttgttaatccaagccacagcattgttctgattttttctaacaatataatgaggaaaaataatgacataaataattgacttctatagaatacaaaaagggaaaggatgccgagacaagaaaaaaaagtgcctacaaactattattatttggactagcacaatggtttgtagaactgaattaacaccaaattttgataaaacaaaacaaaagacaacgaaaaaagtctcgacatttttctatagaattttttatcagctccccttttcggtattcttgcgaacaaaatggaggtctgaaataacaaaaaatagaaaattgaaaatttcggtgttcaaaaaaaaccggaattatcttctcttctttatttgcttttatcacattaggaaagaggaatacaaaaaaacaaaaaaaaataaaagtaaaattgaaatacaaatggcaaaaagtggagaattttgacgtaaagtaaactttttctatttttgttccttttcgaaattgatggagtgagtttttgatgaaaagaagaagatattctttctcaaaaaaaacaaacaaaaaataaaactatcgaacaaaaaaatctgaaatcaaaggaaaaaaaaatacacaatacacgtggttatgcaaaagatatttatcttttcttgtctattgtttgtttcttcatgatttgtaataatgaatattcaacgtagtgactacaagaaaaaaaattgtttaattcaggttaaaaagtcataaatgctaatcaaaacaaaatagatgcagtatccttcttttaccactgctattattgctagaaatcgtttagatttcacatggtatgatgtccaataagttcatatcaaaaatttcttcttggcccaataaccttttgaattccaaaaaagatgcgataacaattgcataactgaaaaagtggagcaggaaaacacaacacaacacagcaaaacaataacaacaataaaatctacagaaaatacataaaattgagttatagatctaagaaaacttatgacgactcacctttgcaataatctaacatatataaaacagtaatacccatgtttctcaataataatgctgtcatttaagcccactgtcccaagatattcttctttaccgagatgtgataagatagaaatcaaaatatagacaataataataaaaattataccaaaaaagatgatcttcaatacaaacaaacataaaaacgatacaattttcagtcctgtgtcgtcaaaatttaacatagatggagacatattctactttgataatgatgttcttatttcaacatatacttctgttaatgttgaagactatcctccactattacacagtaatactgtagaaacaaaattaccaggtatagataatacaaacaaaaagtccttggttgttcataataatcaattaccagataatctaatttgcgattcgaaccaatcttcaatcatattacctgaaaatgactctaaatcatcaattcccagcactcaatctcaatcaacaaattatttcccagaacaagaggaactacaaggttatacattagttgagaaaattggtgaaggtgcatttgcaaaagtattcagagctatccccaataaatatgaacgcaattcttatcttttaaaaaattatagtgaagtagctataaaagtcgctagaaaggaagcattttttaataataacaataacaatgatgacgtctcctgtggttataaaacaggaatgagatattattgccccgaacaccgtcgataccatcatcatcgacataatcacatggaaaagtatatagaagcaaataagtcgaaacagttgaaaataagccgatgggaggatattcaagcagaagttttaatccataagagtatttctcctggatgcgaacatatagtagattttattgattttcaagagagttcttcctattattatatcattttagagaaagtaaatgggggcgatgtttttaaccaactattaaaatatacttatttctctgaagacttgacacgtcatataattcatcaactagccatcgctatcaaacacttacatcaagtaggagtagctcatagggacataaaattggaaaatattttatttgagtccatagattataccccatcaaaaataccatactatagaaaatcagataataaggatacaaaaattgatgaaggcgaatttattaagggaaagggcggtgctggaattggacgtataaaattagctgactttggactatccaaaagaattactatgaatggtaccaccacaccatgtggaaccttggattatagcgctccagaaatgcttattaaaaatcagtattctacaaaagtggacatgtggggggttggatgtgtattatacaccttactctgtgggttcacaccattttatgaagagaatactgaaaaattgaaaaagaaaatttgtgaaggtaagtatatttttttagaaccatggtgggatgaaataagtttagaggccaaaagattagtatccaaattattagaaactgatccaaacaagaggtatgacattgatgagttattaaatgatccttggttaactaactatgattgcgacaaaaataaatcacaatcaagaccaaatttttctaatactgtttttgaaaggaataaaaaatcaatattatatgacaataagatgtctgtggcagaaaaatcatatttattgcatcctacattttcaaaaaataatgacattcaaaggtcaagacaaaacaatattaatactgacttagccaccggattttttatcaaacctaagcaattaatacaatcaaaacttcaaagaggaatgtttattacaccgaatctaaatctgagtccaaatttaaaattaaatctacatacttccacaatttttaaaagaagaaggagtaagatattacatataaaagaaaaacttaatccatggtcaaagcatacccaacgacaaagacatgaaaattatacgaatatttcttgaaaaaatcctcaactaaagatttaatattacttgatcattaattctccgacattcgtttacatcactggttataaacatatatacatatttgcatatgatttcaaatacatccattactatacatttaaaatacatatagaccctactaatattataatgttgttgtacccattctatattcgtgcatatctatatacttgtgaaaatattcatcttactataatatcacaacaaatcacagcaaaccaaaacaaataaagaaaagaaaagcctcaactctacatccacacacccaacacctaaacgagtaattttttcttctcccttttttcactttaattgatatcaatctaggggaaaaccttgttttatgtatcctcgtatatatatataaaagaaataaacctttggttagatcaatggtgatcttaaatgaaatcttcaaagaaaactaaaaataggaaaattattaaaagaagaggagaataaaaacaaaaaaaaacttaagatacagtaaacaatatacttttttgtgtactaatctaattctttataaaattagctactactttcacaatgtttgaatatagtagaaggaactatgatcctcaattcaagccagtgaaaaacatttatgcaagtagattaagacaattcattaacagaggtggtgatttccctgacctaaatttaccaaaattttatgatattgaccgtatatctctagatcagaaacatgtcaaagtttggtggtatcaagtggacttccaaaagagttcatctcctgtttctccggacaaaagacccagttggaaaagtattatagatgccgataaagaaggtaaacttgaatttaaagtagcaagtagaggtcaaccatttggacccagctggtctaccacgtggtttaaagtacaacttgagattccaagtgattggttagaatcaaaacaacaattaatctttgagtggaattgtaataatgagggtgtagtcattgatccagagactttactacctgctactgcattctctgggggtgagagaactgagtatcttttaccatttaacaaaactgggaaatacttcttttatattgaagcaggcaacaatggtatgtttggatgtggtgaaggttctgatattaatcctcctgatgataatagatacttccatttggacaaagccgacatcgtttttccagattgggaagcaagaggtttatatatcgattactggatgttaactgatgcctcaagggaacttcctgatgatacatggcaaaaacaaagagcaagacaaattgcaagtcaggtcatggacatttttgattgcaatgataggtccagtgttgtggcttgccgtaagttcttacaaaaagaatattttgatgagttttccacttcagaagaagtatattccaaaggggacataaaacaaattaatacagtttacggtatgggtaattgtcatattgatactgcttggttatggccatttgctgagacaagaagaaaaataataagatcatgggcatcacaatgtacattaatggatgaatatccagaataccaatttgttgcatcgcaagctcagcagtttaaatggttgcttgaggatcatcctggtttttttaataaagtcttaatccctaagattcaacaattccaattcttccctgttggtggttcttgggttgaaaatgatacgaatataccatcaggagaatctcttgcaagacaatttttctttggtcaaagattctatctgaaacattttggctctaaatcagatatcttttggttacctgacacctttggttattcttctcaaatcccacagttatgtagactttctggtattgataaatttttaacccaaaaattgtcatggaacaatataaataacttcccacactcaacttttaactgggttggcttagatggctctcaattgcttgcacatatgcctcctggaaatacgtacactgcagatgcccattttggtgatgtgttaagaactgctaaacagaataagtccaatgaattttatgagtctggtttgatgttatacggtaaaggtgatggtggtggcggtccaacacgtgaaatgctagaaaagatgagaagaatcagatctatgtccaatcgcaatggcaatgttatcccaaaattgcaggttggtacctctattgatgaattttatgcaaacattcttgagcggactaataatggtgaaattttaccaacatgggaaggtgaattatactttgaatttcatagaggtacttatacaacacaatcatacttgaagaaattaatgagagccgctgaaatatcaattcatgatcttgaatggcttgctacaaaggtgtctatcctctatccctccatatataaatatccagtgaacaaaattaatagcttatgggaggatatattgttatgtcaattccatgatgttttacccggcacctgtattgaaatggtctataaatatgaggccataccaatgttaaaaagtgcgattaatgaatgtcaaattttgattaatgaaatcacatcaattttaaaggagcaaaatcctcaatcaactcattgtggaagagttagaacattatcatggcaacctagcaccaaacttgattcagttgacaacaccactttcaatgttacacttactgaaagcagcacattttatgtactaaacaatgggagattgcatgtatccattaataaacaaaagggtgttattaccgatattttggatctagtaacaggagtgcagtatatagatcacaaaaatggaagaaataaacttggtgccaatcaatttgttctatttgatgataaaccattgaactggcaagcatgggatactgagttatattcagttaatcaatataaatatattaatgaaattgaagatattagaattaataaaaactctccacaagagtgttctgttgaaattatatttataattactaacgattgtaaaataaagactgatatcagtctaaaagcaactacttctcaagaactttacacaaattttgtagaaattaataccacagttatcaattggaatctaaggaacaaattcttaaaagttgaattccccatcaatgttagaaatgaatttgcatcgtatgagacacaattcggtataacaagaagaccaacccattataacacatcatgggatgtagctaaatttgaagtctgccatcataagtttgctgattattcggattatagcaagggtgtttctatcttgaatacttgcaaatatgggttttccacacatggcaatttaatgagattatccctgttaagatctgccagagctccagatgttcatgcagacatgggaacacatcaaataaaatatgcaatttatccacatatggggctgttaggctttgatactgtaagagcagcacatgaatttaactataatgcagtatattccttgccggagcaaatagcttctagaattaataatttaatcactatccatggtgctgagaacattatcttatcaaatatgaaaagaagtgaggatgatgctgaattagtttccaactactcattagaaaagaaatcaggtaaaagtattgtggtccgtgtctatgaatcattaggtggggaagcatttggtgaattaagaaccccactaaagataaaagaagtttgcaaaatcgacaatcttgaattgaacacgattgaacaagttatgactgaatcaaggcaatctttaaactgtattccactacacttaaaaccatttgaaatagctttatttaaaatagtctttgatgcctaatagtaaagaaaggtatctgtgaaaatctatttattttgctttttatttgtttactgatcttctttttagtaatttattactctagcttatcttgctatgtcttatatatattaatgtgtgtatgtactatcaacacttctatatatttattgttcttataaccttattctatttaaagatttgagaaattcttttttcatagttaaaagtaatttctatttactgcacataaaaacatctgagcgcaaacatatcttgcataggaatactaaacgatcaagataatctaaaggaaatatacaaagaacaagagcaaaccatctattaacaatacattctccaatataatatgaacactacaagtttaaccaaaaccatcaagtttattgaaagacatttggatcttttaccaagtcaccaacaatctcatgatgtaaataagtttgcgttaatattttattccatagtttccctttccgcactaaatcaggacgtcacggataaatactataaatatatcaaatggattagaagccattatataagaataactattaataatgataaaaaaattagtgggtttgtaggaagcttaactttaaagactgataatgtgacagctattagtctacctaacacactatttgcattattaacactactaattataggagatgagaccatttttatgaatgataaaattaagcatgaaatcaaagaatttgtttcacattgtcagataaagactcacggcggatttgtttcaactctagattatcacacttcagaaccctctcctacagactcccacgatctaaggtttgcatatattgcagtagccatcttatatatattagggtgtagatctgatgaagacttcaaaaaatatattgatatagataagttgttaggatacattaccatacaacaatgcgactcaggtgcatatggtgaagaaaatgaaccacatgcaggttatacatcttgtgccatatctatactatatattctaaaaaagttagatacactctcttccggatttaaacaaaaaactgtagaatggttattaatgagacaggtatctaatgaaggttgtatgaaattacaaaatggatcaaatgaaaattatgatttaattgatcatggtggcttccaaggcagagagaataaatttgctgatacatgctatgcattttggtgtttaaattctttgaaattactatgtggtaatagttggaaacaattaataaattataaacttgttgagaagtacttaacaaataccacacaaaataggctcataggaggatatcaaaaaaataatgaaactgatcccgacttatatcatacatgtcttggaattgcagcagtccaattaattcataataacttcgatggcgctttatttattccagcaccagtggctgcagagtataatttattgtattcaaaccaataacaaatgttaatatgcaacagaatttcagatagaaaaggcaaagaaaaaaaattcttttttaattcctactaaaaagtttctgacaattgctaattaattgaatactaaaagcaaaatttccctacttcatgtttattactatctattatcagtttcacctaggttttaaataatgtatgagttctttaaatgatatttctactatagtaggaatacagtcctcacatttgtcattattctttgccttttctgacaagctactccgattataacatatagatataacttcttgcctcttcggttggatccaaaaagtttgaaactctatcaagttaccagcaatatatttacttattttaagttgatctttttcaatagacccaatgtccactttctttaaatcaatatttaacccaattcccaaatactttgcataactttcttttagagaccaataatgggcaaaaagtttctgaatttcgtcttttgagcaatcgtataaagtcctgtattcttcttttgtgaatatatctgtatataactccaattcttccttacatcgtaaatcatttatagaagcaatatctataccaacttcataatcgagaagatcattttcatgattccaaatatacatacaaacgtattcttccccatttgacatgctgaatgatatattaagattatccgcttgtagcactggttttccaaatttatctctggcaaacttcaattctcctaatttcctatcatcataatgatttaccataatcaagcatccaaagtactgtaacaatttattacataaatgtttaatttgatcattacgaaatttcttttttaagatattagcctgttcaggtaatggtaataatcgtattgcatgttcaaaattatagtcatcttgtaacccagttttacccaaattcaaaattaaaataaccatagactcattagtccaatccatttgttgttttttatcactattaaacaatatgagaatcagataatacttcaatcaaagtcacaaacaactcacaatgattattaacttgattcagttattatgtattactttgttactttttgaccttatttctttagcataatctacttgttaacaaaaagtatttatgcaacattccaatatggacattaaggatactaccttccttcatccacccagtaatttttactcttatctagtaacacactccatgacacaaggttcagtttgattcaattgtttaatgaaacttcacctgttttagttgttagttatttttcacattttaaatatttcgaaaaatcttaaagtagagagaaaaagtatcaaacaaatattagcagggctgacaaatgaagagaaaatttcttgccagttggatgattagtgacagaagagagtaaattgcctgcaagaagaatttttagttaaattctaggtaaaggataacgttaataatattgctaattaattatctgtttgtctttttttattctttatttattctaattcaactgaaaataaagtgataattaatcaaaaaaaaaagaattaaaaataaaagagctttgttagacctagtaccttgaacttacaatggaaccatcaaacgataaaaatacaggggaacagaatatgaatactaacaaatcagatttgattcaatctgcaatctcatttttaaatgacgataccgtgaaggatgccccattatctaaaagaattgagtttttgcaaagcaaaggtcttaataaagaagagattcaatatgcattagatgagtctcaaaaactgcaaaatacagtaactataaataacaacaataacgatcaacatggtaaatattttaaagctaataatgataccaataataatagcccaaactatatatatgatattttgcctccccctttacctgaacgtacatggaaagattattttgtgatggctactgtcactgcaggcttattttatgggttatatgaagtaactaagagatatgttatacccaatattttaccttcatccaaaaacaaactggaaagagacaaagaagaaattaataatcaattcgacatgatagataaagtgttaaatgaaattgaaagagaacacaaggaatttaaagaaatggaacagacaaaattggatgaattagatgctacaattgaacaactagagacttcattggaagaaaataaacaatctagggaaaaaattaatgatgattttaaattacttaaactagagttatcaaatttacaaaatactttagaaaaattcatgaagaataatcaaaatgtgaaagaaattgataatatcaatcaagaaataatatctctgaaaaatcttattaaaaattctgatattttcccaccacagcagaaaaaactttatcaaagcaataactctatccaaggtatggatggaagaagtaatgaggacagtattaataatttagaaaatgaacctgaagatatattatcaatgcctgctacagatggtattcctggaattgatgctatcccatcagcttctgaacttttagccaaattcaataaaaagaaaccaattgaaccagccattactaacgaagttttccgtagcaataacgaaggcacagatgacaacaattccgataatgatctagaaaatactacagcaccagcatggaaaaaatctagagagcaagcattttctacaatgccacaaaaaaataattccaacactaatggcactactttaaataaggccgctgatgaaatgccagagtggcaacgtatgctacaagatgaatcaaattgaataaatatatattaactttaagaacttaattatcaaacattacttcaaaggtcaaaaattgtgacgttctgtgtttttatttatatattttcatgtaatatgacaacggtctttttaaatgcaaatatcattacaaacgaagatgttgcatatgatattaaaacatccatacaccacaatacaaaatgatgtaatatctgactttttttttcttttttcttttttcttttttctttttttttcattacctgaaaaaaataaaaatagaacgaacaaaaataattatggcagtccaattttatactatacctataatattgagtattatttgtaagtatctggctttagttaagagtttgtggctttacaactagtaaaagattaagcaaccaagcgtataaaggataaacacgtcgatttggattaattctgattaaattctaatatacatcaagcactatcaatcttagtctcgattgtttcactaagttatttgatccatttatttattttttatttatcatccttgtttttttatcacaatggatttacaaaatgaaagtgtgtttactttagctatcaaatgttctaataaacatttatctcctacagagtttgttaacctatataaagaattttacaatgaaaagtttgcttcagtttttgaaaaagaggaagaaaatgaagaaacagaaaaccaacaacaacaacagcatggaacacaagaggatcctaaaggggaaaatatcaagccaaaaaagttatatgcaagcccaaatgagaaggtgaataatatacatacagatgaacaaaatagttcaattaaaaaaactggaagcgatgctgatataaataataagagccaacacgatgattctataagtaaaaatatcaacaacgaaagacgaaaattgatggatatattatctgatgactttgttaaaatttttaattgtgaccaaccttttttattggccgattatgctattgaaataatatttattaattatgacagtgatttggtccattcttttatgcctaaattgactactgtgaatttatcgtcaagttcctcatcaatgctcatttattttttcaatcgatcctgtatctattttgataagttaaaagataaaatagtcatcgattcgttaaataaagacttatcaacaataataatacctaatatgttaaatggtaaactcttatcaagttataacaacaataatgataaaaatcaattaatattagcactagccaagtttttacattcaatgttaaaactcagttcaattcctatagtgatccaaacaaatccctataaagataattttatttctttaatgtctgaggtttttaaaattaacagactgcttcataaaaagatttcaaatgctgcagattcaaaattaatctttaaagatttagattcatattcaaataaagataataagttgtcccaaggatcatatttacactcatttacacaacaatctttgttaccagattttgcaacaacaccttcattaacttcaccacagtttatccctagtccattatccacagtaaaaacaccaatttctaatcattcaatgcatcatacatcaacaaataaatataccaatatgaaattgatacgttactataaaaatttatggttgaatagcaaaattatgaattgggaaacatttaatgataatttcttatccaaatacagttcaatttcttcttatgtctttcacaaacctaccactgtcatgagcccccagaataatgagacaatattgactgatctaattgaaacatcttttatttgttttgcacaatatgtaagtaataaacagtatcatagatcaaattcaaatttaaatctactggaaaggcaatggatgatcttcatctgtaaacatttacctttattaattttacagcattgtccagataaccctcaaatagtagtaaatgctttagaaagcattgatactaaagttatcaaggcaataaaatcatattactccgaaaaagaagatattagaaatagaaatgaagacctatttgatgatttttccgttactagctttgatataagacatgatttcattaaatcattaattatgttgggattacaaccaccaacactaatcaatgaatttttacgagaggatcaactaattgatcctaagactttacaaacttctgatgatgttttaattactacctcacaaggatttcaagagccattgtccaatattactaatttcttattgaattcattgaattccttagaaatagaagctgttggtaatttaaataatgaaccaattaatggcattcaacaacttttaaatggttttgaaaacattgcaccaacaaaacaaagagaaatttcgttaacaatcgtaaatatattacatcaagccattgaaaactgtgaccatcctaagatatcaaaattatgtagtttactagtttttaatttttctcattctttaacatttatattcacatattgttcaccaaaagggattattgaaatgttaatgaaatttattgataatttgtgggataaatctgtaaaattaaaaaaagaagatggcgaaaactcagaagaaaataatgagttatcattttcattcaattgggttttattattattactatcctgttataaaaactataacatatctcttcgtgacattgcactaacatcaccaaatttgaaactggaagggtcgttttgcattaaatatctttccaaaattcctgaaattcttgatgatttttctattaatgttgaagacaaacaaaatccagaagttcaaacacaatcacataatctagtccaaagctggttaacagacttattcataaatggctctctatcagataaattgaccaataatactgatacaaagcagcttgcagagttactcccttttattttaaaacaagtattctatgcaatagaaatgaatgtaattaatgatataaatgttattattagtggattagaatattttttacaaccttttatgattgttggattattaaaagttatgttttggtttagtgaatatttgatttatctttacaatgaacctatttcagatgaattattacaaaggatacttactacaataaattcaattatcaatccaccaacattaaatgaggacaccaaagctttccataatgctgtattaagaataaatgcagtatcaacactaagcatactcagaaagttcaaagaaaggcaagcccaatcaaactatggtgtctattcatctgatttccaagatcgctccgtattagatcttctaatcgaaaaatttaccaacgttttaaacatatcaccagtatataatgtagatccaagagtctttctaaatgactcaatgtactctcaacaaaagccaataagttatggtaaattgtcaatcctcaatgaaaatccaattaataaaataatggcaaatcaaattaactcattttggaatttacacagtagtacatattataatcttgattttctgaaggagattatcaaattagtaacacctaaaaatttcctgtatgatgtattagaaacattggactacaaattaaaaacctttggtgtaccagtagctagaaataaaatgagttctattgaatctgaacaagtattggaatactttttatatttccttgtgttacatgactgtgaatctcaatgggatgcagcaagtatgattaatttattaacagagaatagcaatgagaaaaacattgataatacaataaaagaagaaacgatagaaaagcaagatatacaacctaaaacggaaacaattccagatgacgatttcgacatgctatttggtgaaaatgaaaccagtacccaaggcatcaataatgatattctacctgctggtatggaactagaagataattcaaaaaagttaagtgaatttaatgctttaaagagagactcctttggtatacttcttcatgaattaaaaccacaacaagaagaagcataccacaacaaagagctatcgaaagaggaatatgagaaattcaataagatttacactctatatttaaatatgttgaaaacatgtgttttttgacatctaaaataaaaagagatgcatcaacatttaaaagtttgtacaattcttttatatttatatgcaatagattattatataaatatgtgtccttgttaataaaatacataaaatactgaaagacaaatcacatgtaaatcaaacaatatttagcttatgctaattagttttctctcctatatttgcagatgcatcaatggttttaacatgacgaccttgtgttttaccttccatgacaacctgttgaacttgttccttttgtttagctctatctctcattctttcttcaatagtacctttaaccaataatctataaactgtgacttgtctagtttgacccaatctatgtgctctatccatagcttgtgaatcgattgttggattccaatcagaatcataaaatataacagtatctgcagcagttagattgatacccaaaccaccggctcttgtgcttaacaaaaagataaaaatttcaggttttgtttgccaatcatgtactaaatcacgacgatcttctaacttagatgaaccatccagtctaatatgattatattgtttgtatgtcaagtattcttccattaaatccatcatttttgtcatttggaaatagattaatactctatgtccttctgctttcaatattggtaacatttcatccaactttttcaatttagcagaatcagtaataaacctatccatcgaaggcataaagatattcgaggagaacttcttgttcagtggggctggatataagcctgttactgggaaattttctattgggatattcctctttacgtgcatattgtattgagtaattgaaggaatatcactaaatgcttgagaaacaacaggctcgaatagttctctatgaatcttatttgaaaaattactagatcccaaaacttcaatagtaatcggaggagcagcggcaccatcatggtaccctctatttaaagattcaaaatagttttcttcataatagtgccttttaatatttaacaatgaattcaacacacccttagtagtagttctagccaattcagtaatttccttacttctccctgtaacaattaagctcctttcaaatcgagttattggttccaaatgtctctttttattcttaatcaaccttgttattagaaaatcactatggatacctgctatgtcattaccattataacctgatattctgtataagtatgcatttaatcctctgttattaataggtagataaatgttcatcatgtgattcacaatcttattgaatgttgacaaagaatttttgtattgaggtagtaatagttcattgtatattaatcttggcaagtggtatgtaataggattgcgagaagaataaacaacatctgttagattcgttaataaatgattagacactaatccgctattggcagaactatcagttgtggccacatttaccatactattattattgatggtgcttgctccaccaagattggaagaaccctttgttattctacctgtcttaccaaatgtagcaaaggagaatggtgactcaacatcagctctttcaaataaatctgggtgattacacacttttctgaactgcataacagcgttaatcaaactttgatcactattgttctcatctgaaccagctgcattttcgatatcatcataattcgaagacaactgagattttaatacttgatacaatttcttttgtctttgtgttaaatcacataaaacatcaatttcaatcttatcacctaattctgattgaacgttctttttaacacgtcttaacataaacggttttaaaatcatgtgtaatcttctaacttgctgttgatttaattgtccattaccctctgcatgcgattcaatatctttagaaaaccattcactaaattcatcatgtgagtcgaacaaagtaggcataatgaaatgcaaaagagcccacaattcttgcatattattttgaattggagtaccagttaataaaagacggttacgacagtgaaagcttaacaaattcttccaacgtgatgattgagaggacttgatagcttgtgcttcatctaggatcatatattgccatctcatcttttgtaagtatgtaacatctgaaaccaccatttgataagacgtaatcatgacatggaagggtgaatccttattatatctaaggttttttctgtcccagaactttcttaaaatttttctatcatttgcattcccccagtatggtaaaatcttgaaatctgggacgaatttattaatttcattaacccaattatgtaaagtcgaagcaggtgtaacaaccaagaatggaccccatatattataatgttctgcaagatgagccaaaactgatatggattgaactgttttacctaaacccatctcgtctgctaaaataccattaataccttgatcatacagatttgctaaccaattcaaaccctttaattgatattccttcagagtacatgctagcagttttggttgttctaatgtgatatctcctaaagaagttggattttggaaattcaattcaccatcaccatcaccatcttcattatcattatcttcattgtagttattactgttttcaagatctcttgttgttttactatcaaattcttttgccttagctctattttgtgcaataacactggacgcattctctgcagccttttgcctcaattgttcatcatcttcattatcaaaatcgatatcatgcatgcttgttctattagcactagttctttctaaatcaatctcaccatgttcaccgcttgtatcaccaatcttatttatagtagtacttgcagattcattaccttcaatctcgcttgttttaatctttcttccgatgaaatgtgagtataattccgtttgtgttaataagaaatttaattttttagcttgtcttttattttctctttcttcttcttctctcttggcttgctccaatgcaatcttttcagctcttttcttaatttcacgttcttcacgttcgttcctcttccagaaattcgacatttctcttatacctcttcttgcttttgtctgcaaatctttaacttgtttaaaatttcttgtttgccattttttagcttctcttgcacataaagatgaagtctttttaaaattagttgatctaacagattgaatctgctgatataatcttaacattctattagagtctttacgtgccatatccttccaaattgtgatataagtgttatcataatgacgttgaatagctcttgcttctcttgcggacattttaatcccgtaggtaggtaaatcgtgagttttccttttattaacactttgtacattattattattgttattattatccatatcattatttgccgatttcttcttgtctattgaagattgattattttcgtttgaatctggtatattagttgttgatggatttagtttccgtcttttctttgaaggagaagttgttggtgtatttgaggcactgctattagggttagttgaattcgaggaagatttattattattattattattgttgttactgctgtttgatttttttaataaaagatcattctctaatttttccttcaataatttttcctttaataacttttcctgtcttcttctatcctcattaattaatcttcttaatttttttgaatgattttgttttaaggtgattctaatttctaaagttagttgattattattatcatcatcattactattactatcactattattctgataatcattaatgaaaatatttgtaaatcttctttttttggttctttgacctttatgctttttatataatctttctaattccttgacaataaatttatgatcggaatgaatatcgatgtcaattgggttataatccatttggttttgcgatctttgtaaacgtggatttcttttagtttttctttgatagccgatagtaaaatcttggtctttatcgtcttcattatagatatcttcgaattgttcttcatcgagatcgtcaagatcgtcaatatcttcatcgtccacttcttccatatcctcttcttcctcatcatcgtgttcacctattgtattatcttcttcattctcattctcaatatcaatatcaatatcattctcattttcattttcattctcattctcattttcattctcattctcattctctttttcgttctcatttttgttttcattcccatttttattctcaccttgaatactattctttttgtgctctattcctatattttgttttttatactccatagtactgtcattcttttccacaagacttagtttatcgttatttttactggagatagacctgagtatagcctgatacctagtgtctttatagaccagatacttttcccaattagaattcagacttgtataatattcatcggctgcctctgttgatggatgatcatccttgtcagacaacaacaggattctgtttttgttcaagtctttcaaattaagatagttccactcgttgatcagctcgaattcttgtaagtttaggaacttccagtcctggtacagccattccagattgtctctaaacctgtatctgttgaattggtcatttagtttgttcaagtatttcaatttccggtcattatctgtcctatttttgacattatcagttaacgaatcattatttgaaaaaccattagttgaggagttggcagtaatgtcagtagttgaagacttgttgatagggattatgtcttcatctcgatcatttaatagtgcagctagagacattatatcaaactagttgtgaattttatttttttttgagtattttgaatatatgagtgtatatgagatagagagacaaagagacagatggaaggttaaagaaagaaaaaaaaattgtaatatgtatatgtatatgtatatgtatatgttagggatgatgtttatggttatttactaagggttgctatacgatatccatacatgtgtacgtacatagagataggcatctgttgtaacacatttgctttttgaacaagagacaaacagacaaaccaagaagaaacaaagaggtaaagaaggagagtggattgggaacagattataattgggaatgagaaaggaaagaagatgagaagtacaagaaggaaaacgtaaaagaataaaagaaaaaagtaaaaaagtagaaaaaaagaaaaaaaaaaacccagcccaacaatctttctctctttctttcttgcttgctctctttctctatgatggtgttctctttacttgaagaatgaaaaagcgcatagagaacgaaagaaagagccaaatctctaaacattatcctctcaactttaagccctcaatccaaataaaacaggaaaaaacaggaaaaacaggaaaagacaaagacaaagacaaagacaaaggaagaaactaatgaacacaaacaaataaataaaccatacaatcattcaagtattcaaacgtacaaacatacaaatacaaacacacacacacacacacacacatatgctaagaatgaactgtgtggtacaatacctcttgcatcttacttttatttttccttttaagatcaacaagacaagaaaagaagaagggataacataaaataaaaaataaaaaaaaaaacacagacaaccataacacctggtgaaagagagccatgtattaatagggaattatgaaagaacaaaacaattatattaatgtgtattatagacaactatatacacgagttaaacagaaaaaaggaaaagctgtctgattgattgattatacatctctgtttctcatcaagttcctccccttctccatcttgttaaaattatacatgtacctacatatagacacaattgtacaaaaaaaacaaaacaaaaaatcttgttctagttactggctcttcttgcagatgatcaaaacatctagcatgtaagttaatgtatacaagtatacaagtatacatactcacacagtatggattgtgtaacacattaagattgtatacattgtattaacatcattttagacgtgagcgttagaaagccatctttaatttctttttgttatatgtcataacaataataatccatagcaaaaaagcaaaaaaaaaaaatacaaattaaaattataataatgataataaaggtactcataataaaatgactaataatcaccgatactataaagtaatataaggaaaaaaaaaaaataaagagtcaaacaaaagtatatacctgtaaatacatatacacatatacgcgtttatacatttgtgcatttgtatgtacgtatagaaacaaaacacaaagtaactatctcaaatatattagcaatagcaatagtggactattaaaatataagctaattattattcaagatataatattatgtcctctttcggtactatctttagagtcaccacctatggtgaatcccattgccaatccgtcggttgtatagtggatggtgttccacctggtatgaccttgtcagaaaaagatatccaaccacaattatcaagaagaagaccgggtcaatccaaactgtccactccaagaaacgaaaaggataaagtccatattcaatcaggcatagaaaatgaaaaaactttaggcaccccaatcgccatgttgatcaaaaacgaggaccaaagaccaaacgactattcagagatgaaactatacccaagaccatcgcatgcagacttcacttactccgaaaagtacggcatcagatcatcctctggtggtggtagagcttccgctcgtgaaaccattgggagagtcgctgcaggtgccatcgcagaaaagttcttgaaacaggtcgacccaaagatcgaaatcgtggctttcacatcccagattggtgaggtcaaaatgaacagagaccccttcaaccctgatttccaaaaccttctaaacacaatcaccagagataaagtcgactccatcggcttcatcagatgcccagacctgaatatcgcaggtgacatggtcaaggaaatagaaaaatacagaggccaacaagattccatcggtggtgtggttacctgtgtggtaagaaatatacctaccgggttaggggagccatgtttcgacaaactggaagctttgttagctcacgccatgctgtctatccctgcttctaaaggttttgaaataggttctggtttcgtcggtgtttctgtgccaggttcaaaacataacgatttattctactacgacgaggagaagaaaagattgaggactaaaactaataactctggtgggatccaaggtgggatatctaatggggaaaacatttatttctctgttgctttcaagtccactgcaaccatctctcaagaacaacataccgccacctatgatggtaaagatggtatcttggctgctaagggtagacatgatcctgctgtcacaccaagagctgttccaatcgtcgaagctatgactgccttggtattagctgacgctttattgatccagaaatcaagagaatatggtagaagtgttgttcattaataaataaaaagaaaccacgggaaaagaactttccttgttttctctttctctctctctctctctctacatatatacatatatatatatatatatttgtgtagactaaaatattaacaataatatatttcaacctatttatttatctgattataaggaaaaatatgattattgtatatattaaaagtaaaaaatgaaagaaaaaagaatgtacaaagaaaagtatatatatgctaaataaattatacgtatatatatctccttctttctaatttacttagatttcttcttcaataacacccttagaagaaacatagataccgtctaagaacttacggatatccttgtttctaactctacagatttgttgaatatcagcagcattttgagaaacgttttcaacagagttaccagataagacaatttcatccttttgagtggtggagaattcaatagtaacaccttctctaactggaactaatctgaccttcttgtcacctaagaagtttctaatttcgacaaatttagcaccatccttttcaataacgttgacgttgattgggaaatgcgcataaacgtatctcatcttgtacttgtaacccttagtgacaccagtaatcatgttgtcaactaatgatttgacagttcttaaagcagcaacatgctttctgtcaccattgtggacagtaaccttgatagtgttagcagaggtcttggtgaaagtaacatcaatgtgctttaaggacttggttaaagtacctcttggaccggtaaccttaacaacacgggacttgatggcaacagtgacaccttgtgggatggcaatggtttgttcagtttggatgtgcttcattgtctattacaggattacagggttcttttcttcttgaataaaagagaaaaaagatgttactgcaaaacaagaaatgtacgaaactttaagaaaacatagcgatgctaatagcaacatattactagatagcaaggctcccaaacaatccttctattaaccaacattgctacactaccctgtgttttaattacttttattttgccaatcttaccttcaaccaacatacagaaaggcattggcacattatgattaacaaaactaaccgaatcccgcaaaaagttggtatgacctttgtgagtttctaaattggaaaaaaaaaattggaaaactcgatgagttccatttttgtttttgtttttctttttttttatttatttatttatttttttttttgaaaaacagttcataccatctaatttcctcattgagtaaattgctaattggaaatttttgttttttcataatgttttgtgttatttgtttcacaatttgaaaaagaaaaaaaagaaactaaaaaatgaaactagaaagaaggtaatttttaaagagaaaaggtctacacaaccttacacccacaaacagtcctcaaatccaactttttttcatcacactgacttgatttactttaaatctacttacttttactgctctctaaattgaaccataacgctaaatacttatattacatacattcttgtctgctaaccaaatttatcaaataaaaaacttatctttcattatcagtattgttattattgttctattaatgtatcgattgatactctagtcaatctagagttttcactatgtcttgtgcatatttatttaccaactcaatcgcatcttctactaacctaggtttaaaacctttcacatacgtgtcatttaatgcaatggttctaacaggtgcaatcactttcccttgtgaccaactgataattaatccattattagcaaccatgctctcgttaaatgccggatcgaaaaagatgttatccccaataatagccaaaacaaagaccaatggcggagatacatccaacttcactaaatcataatcatggaacgtaggtaattcttcaacttctaagtcatcaaatgaagaaattaatttgggtaaatacgtagacttcaacgctgagtatataccaaatgagattagagatactggatacgaatatgaagacaatactaatacatcgataaaaatcttgaaactgtatttctgtgtcagttgtaatttggatgaatcaatagtatcaataatcttattaaataatgatgatatactttccaccagtaatgaatcatctctttctccagcaatatctatatctacttgaatcaaatccttctctacagcatggtctacgactttacttttaacactaattatacattcgctaccatcactagcaatgattcttgcagaaccatttgagcttggtaaaaaatctgtgtatacttcaataggtcttaattgatgcgctaatcttccatctggtctcaatgcttgaggacttgatagagaatcaaataaatatgatctttcagctaccgataatgacatcgttggatttccaagtagagaaaaaaatagctattttctttctttcttttataagttattagtatgtaaatatcttattttccttcaaggtatcctattaatattaagctctaacgaagaaatgttatactaatgtgttcacctttttttttgtatcgtttactccaattctattcttgtattcacttttttgatagttgcctttcaattccttttctttttttttatttttttaattattttctttgtttcgtctatcttctttttaattagaaaaaaaacaaaaagaaaattcaaatcttgaatatgcaaaaaaaaaaaccaaaaattaaagagcgtaaaatactgtatgcattgctaaacatatataaagattgtctaaattcgaatcatttgcaaacagtaacagaaggtatcgcgcctcattcacaaatgtttttatactctaacattaaaggctttctggaatagttatttatttccatttactattaatccacaagaagaagaagaagtagatatgttttttaagaatttgtgttgacataataccaagataaagaaacaaaacaacaattgcgaattatatccatcagtagatatatataataacctagtaaaatgaattataatattatttaaatattcaatcgatgtgttaacaaaaaaacaactaattagttgccatggttacaccatatttaatcaaaaaagaaaaaaagaaatatactagcaaacacctcacatttatatgtataccattctaaatagtttgcttaagataactaaaggagacccttgattattggatgatacgccaaagtgattcttttgattatatatttcttaatacagacatcaacaaggtgactcttaatatcataccaagccataaacattacaataaccacccatttaatcataaaacatcaaaatccttatttaatcctatatatctttggcagaagtatttatcttgatactaattgagacaaatcatcctctttgcacatcactgttcttcgagctttattgcaataaacgacataaaaaaaatactattaaacaaacgaaaaaaatgctaattttatattataatatctaacactaaacaagtgctatataaaaagacattagtattatatcctagtctactttattttatttattcatgatattttaatattgatagctcttgttaatttactctgataatatctaatgtaaatacatacacacacacacacacacacacatatatatatatatatgtatccctactggaaactctcacaaacagtaaacaaacaataaaatgtaatatattctcgactacatctatatatgattcgataattaattgcaaaaagatagtttgtaaaaaaagagaaaagtaaaagaaggcactgctgtttcatttatttcataatctataatgtaaaactaaattaatatctaaattagcttagacaatccaaagtaatgcattttgtgacacacagaaaagggaggggaaaaagaaattaaaatgtgcaatatatatcaatgtgttgataaattcccctattctattgaaaatggtgtatactttcaacaactacatgatgaagcatttgcagtagcatcagcggaagcagcaagattaactctttgattatcggtaacgtttaatccatttggagtttcatttacatcattagaatttttcaatggaatagtttcaccaatctttaaaaagacttcattaatatttactgccgtctttgcacttgtctcaaaaaacaatagattttcctcttcagccaatttttcagcctcttctttagctacttttcttccatctggatcatctttcaaaagatctattttgtttccaatcaaagcaataattatatcttgactagcctgttcatgtaattctttcacccaatggcgagcttttatgaaagattgaggcttggtcacatcatagaccactagagcagcttgtgcatttctgtaatacatgggagctaaagatgcaaaccgttcttgtcccgcagtatcccaaatttcgaatttaactatatgatcatcgatattaaccctctgagtcaaaaatgctgcaccaatagtaggttctttattttctgaaaaatcatttgatacaaatcttaatacaatagacgacttcccaactgctgcttcacccaataatactagtttaatactcgttactaggttgttcattttttatttctattttcaaaattctttaatgtataaatataaatcgaaattcaatctatgatgatattgaatgttatcaacctgtcgttaccaatattcttgaaagatagagaaaggaaatcaaagaatatgttagaaactaacgtttaaataaaagtgcatacatacaccaatagcagataacgagaagaagaaagaggaggataaaccggaataaaacaccagtaacttagttttattgcaaagtcaagttgttctagttgtattttttttattctcggcttttatattttcttccccttaatatcttttatattttcttcttgatttcaaaatctctttttctgtttctttttctttttcttttttcccttttccctctttttctttttcttcttcttctttttttttagctgtcagttattttatttatagttcaataaaagtgacattttgataatatatattcatatacaaagcagtagttaccaaccatattgataaattaaaaagacaacaacaacaacaacaacaactataactaaagtcattttagttacggctgtagaatattcagttgcgaatttttatgaaaataaacgattttgccactatataattatatatatatatgccatatcataaaattcaataaatctcagttccttggtgaaattgtagttgaattcatttcatacattcccactcttcttgcaacttttattctttctaatgattttcttcaccaaagaatactacagtgacggtcaaatcatctctatatttcctactcttcggagatggtattgacaacaaagtagacacaaattcttttctaccaccagcacttagtgcgtttcttatcaaatgagtggctatatttgaatcttctaataagtatcctaaggagttactattatttttgtttctattttctctgtacctgaatgcagttctttgtgaatcgtcatcaatgttttctgttatatctgtcactagaggtaatttagaatcttttatcaatccttggtcattctccaaccatttgatagctaatgatgcaatctcttcatttgttaagaattcgaacaaaccatctgatcctatcaccattaattttatattttcgttaatcttagttgtagtaatctcaggtcttgccgtaacatatggcggtgttaaaaaatttctaggttgtgatcttaaatataatttcaaataatcaggtaaactatctaaagcttgcccatcaatctctttcaacttatatcgatagtcaccaaaggctctagatggctgcaaagaacctagaattctaccacgtgttatcacattaggttcatttgggtgttcttcacggattctttttacttcatttagattatcccctgtttgatcgatagaacatgacttaacaaaccattgttcatgggctccatctgattgcttcccaattattaaggctctagaatctccagtgacagctactttcaattttttagtccttgaatcatatatgcttaacaatgcacatgaaccagatatggcaggaaaaacatttttaataaatgttttatttgtaggatctgataacaagtttctaaatgcttgaatcacaatgtcgttatctaattgtaagaaagcgtcttgaatggttttatccataacatctttattactattattaattagatcatttttaataatatttctgactacatatgcaattaaagattgagatagtttagttgatgtataaggaccaccatgtccatcatagataccaaaaaaatacaaatcattgttatctgtacttgattcattatttttttttattgcatcatcagacctcagttgaatgatatgttctgaatggttatcttcaatcggattgtttgacggtaattgggaaatatcatacctatagatacctgtaccacgatctattaaatagctttgttgattggtcctcaatttggtattaatttgctcatcagataacaaagtaacagtatcttttctgtgactttcatcaaaattaggtaacgtatcaaaggaaatatgtctttttgaagagtacctcacatatatgacagttgataataccacaccagcaagaatagtaaaattccttagtatatttctttgtcccttgtattttaatgctgaatattttctgagactatctcttgtcactcttttataaatcacaggaaacatttttgaaccatgtaatccattattgctaaacactctactgaataacatctttgtacaaagaaacaatagccacagtgacagaaatcgtaagcttctattcaaaagattgatatcacttccttccttttttcttttcttcttctttaaacttaatcttttatgattgataaggtagatctgactcgtctctaattgaaaagcacctgttataacaacaaacccttatcttttcatcaaatattgttgatcatagttagtgtattattaaccatttcacaaattccaacacttcccctctatattcaaatgggcggaattaattatccgtagaactttccgccatctgcgaaactcttaacaaactttttttgcgaaaacaaaaaaaagaaaaaaacttcctcgaagaatttggaaaaaaaaacataaaaaaagaaaaaataaaaatttttctttttttacttctttttattctttattttccctttcaagagagatgagtttcttatctttttatatatcgaaaacatcagttacacaatccaacatcgagaagcaatagattaaaaaggtgtaattataaagtctttatcagcttaaaaaagagtatattgccgactcagaaactaatcacatagtgattttttattttttgctttttgtttttattaattgaacaccaatttaagaccatccctatcaagttaaagagtaatgcctccaaagaagaacaaacaaccaaaaccagctaagaagaaagacaatgttgataaaacgtttggtatgaaaaacaaaaatagatcttccaaagtccaaaaatatattaaacaagttcaatctcaagccgatccattaaaagaagaaatgaagagaaagaaacagcaagaaaagaaaatgagagaagctgcggaagctgaaagaagagctttgtttaatcctgttgttgatcaaagagtcagagccggagtagatccaaagactgttgtttgtgccttgttcaaaatgggtaattgtaataaaggttccaaatgtaaattttcccatgacttaaatgttggtagaaaagtggaaaagaaggatctatatcaagatattagaaaagaaagggaaaaggatacaatggattcatgggatgaagagaaattgagaaaagtcatcttgtcaaagcatggtaatccaagagccacaactgataaagtttgtaaatatttcattgaagcagttgaaaatggtaaatacggttggttttgggtctgtccaaataatggtgataaatgtatgtacagacatgcgttacccgaagggtttgtactgaaaacaaaggaacaaaaaagattggaaagagaagctcttgagaatcaaccaaaaattacattagaagattttattgaaactgagagagaaaaactggataaaaacaaattaacaccgataacggtggaaaattttgctgaatggaaaaaaaaacatgttgtagaaagaataaatgcacaagaaaaggccaaattgcaacagaatggtggcaagaagaaattaactggccgtgaagtcattcagaacttgatgcaggaaaacaagagtatgggtagcgacacatttgttgaaggcaatatagaagaagatgctacagataaaccagagggagagaacaatgataatgaccatggttctgcttgggatttgactgaattcactgatgctctaaaagaggcagaacataaagacgacagtaagattaaagattatggtgatggttcaaatccaacatttggtattatgggtaattaaacattaatactagtattaaataaaataaaataaataggaaagaaggaatgatattacaaaactataattaaagatgtgtgctaaatagtaagataaaacacaactaaaaaatataaatatattttacaccattttctctcctctcttttttatttttcatcatattcttaataaactatcacagttcatttagacatcaaaatcaattaaacctacttgcataatgtacaataacatatatatatatatatagtcaatatgataatataactcgactaataatcgtcaatcaatcgtcacctcctctttattgacattagttagattaccattttttgatttcttttcttctcttttacagataatataaaattgccttttcataagtttaaaaggaaaattaggaatgcgaaatatttggaggatcaactgatcatctttaaaaacaagaaaaaatagaaacaaacaatgatgaatatatcgatatatatatcaggtttacatattatgcaataatacacacattacaagcaaagtagactatcagatatccgtaattatttttttttctttgtttaatttctacgtgaatggcatatattggttcaatatcatcaccatatgaatcacccacattcggtacatccctctcattaagagtaaatggtgggttcaatgcagtgtctattaatccatcgggtagagatgtggttttagcaagtagatctggattatttattatagacttggatgatccgttttccccaccacgttggttacatcatgatacaccgtggcaagtggccgatgttcaatggtatcctcatccagcaaaaccatattgggttgtatctacatctaatcaaaaagcaatcatatggaatctaacacgaccggcacttaatgcaatagaatatgctttacatggtcattctagagctattacagatataaactttaatccacaaaacccagatatcttagccacatgctcaattgatacatatgttcatacatgggatatgagaagtccgtcaagaccgttctattcaacaagttcttggaattcaagtgcttctcaagttaaatggaattttaaagaccctaacattctagcctcttctcatggcaatgatgtgtttatttgggatatacggcatgggtctactccattatttaaattcgaaggccatgaaagtggtgttaatagtattgattttaataaatttaatagaaatgaaattatgtctagttcaaatgatggtactgtcaaattttgggatttaagtaacgatggtagttgtctaaaaaccatttcagctgatttccctatttggagaggtaggtatttaccgtttggcaatgggttttgtattatgcctacagtaggtggtaacaactctgtatttttgatgagccttaatgaggataatactaatgatgattcagataccagtaatataaattgtaacactttgtctactacacctacttcgaataataatttcaccataaataatttaaataatagtaaaaaaattgaaaaacttcaaccggttcatactttcaagggacatagtgatagagtcattgattttttgtggaggtcacggcattcacatgattccattgttgatgatcgtgagtttcaattagtcacttggtctaaagattcagatttaagattatggccaattatggatgaaatatatgaaaaagtcaattttgatagaaatcaagtattaaaagaaaaattgccaaattatgaatatatttcttttaataggtgtgaaaatgattctaatctgtcttctgaagagattactaatggatatagcaatgcaaaggaatattttgtcacaacttcaggtttgacaaggtcagatgatattgatcaccttaattggttatctggcgttaagatgaatcgtcaagatacaccaaatgatttatttgaagatacaaaattacaaaatctaggtgaagaagtaagctcaattggtcataattttcccaatattgtctttgaaaaaatatcagtatcaacgggtgagttggtgctaacgttaaaaggaccttggtccaagagcgatactgaaccaaatatatttttaagaattggtattaaggttccaccacattacccaaataaagggaatcctcctaaatttgaaattgaagaaaataataatttaccaccagaatccaggaagacaatcatatcaaaattaattgaaattagtgaagcttatggaaatataaaccaatattgtttagaagcgtgtcttaggtaccttctaggcgaagagattaatttggatgatatagaaaatattggtaatgaacccttattcaactttgacatgaatactcatcttgatttggaatcctttggttccttatctgatatcgatagaaattctcaaattttagattcatcatcctcaacatcgtctgaatctggtcttttaaaaaatacctttaataatgaacaagcgaacgcacataatctatttggaagaaacttggcctttgatagtacacctgtaccgaacttatgtggtgcagtttggactccaactggtcgccttataacattttttgttccagaaaataaaacagatagaattacactcaataatttggagttaagtgaaaaaactttgttgaaaaaacaaaatagtttgaattatgaaccacaagagttatttgatcaagacgaaaacaagttatttcagaatttaagacctaaaagatacgtcgatacactttcaactcatggaaacaatacagaacaagaatatgatacctctgatgaaaagtctacatcagaaagtagtttatatagttttgtagatgattggcatgatattattggtaatgatgttcttgtaaggacaaaacttccaacattatacgataattttactagaacaataggttctcttccttctgaaagtgtcaggactgattcttccagaaagaccaagaatataattattgatactgattttagtcatttaataccagataacaaaaatttagcattagagtatcaagtaatcgacaattctccaggtgaaatggctcgtcataatgcattagtagcagaaaaatatggttttgaagaaattagccattgttggcagattttgtcagatttatttatggcagataatagtgatgatccgttggttttcatttctgaaaatcatttgttaacagtacaatggtttgttagagaagctttaaaatatttcgagaaggcaaataacttacagatggtagcaatgttatgttgtgtgcttgcatatcgaccaaactatatttcttcatttaatgataatacaacatcaagtatcaatatggaaagtaccgttacatttgataaaatggaaggttctgttagttatctttccaatgattcatcatcaatatattccaggacctctacgccaattggaactagtttagctataaacaacataatcattgataatcatcagagatatactcatttgagttccttaggcaataataattccgcaaaatcaaaagacatttttatgaatagtactacaagggcaaattattcttcgtttagagtgtcaccttcctttagtaaaaattcaatacatccttactcacaaccacaatcattaactgcagaaaaggattctaatagtccaataattcaagttcaattgatagatgatgaagtagtaaatgtaaagaaaggaattaattatgatatattagattgtgatgcattaacaagatataaaaattacgtctatcaatattctaatctactttttcaatggatgttacctatagaacgtgcaaaaattctcaaagtagacatcaatattttatgcaataaagtacgtaggaattcacccctacaacagcccttttcaacctttattgggaatacagagatgtattcgaatggtgtaatcacatcgtggttgagaaaatcaccaaaggattatactttttataactgtaactactgccaattgagaatagtaggcaatgcttttatatgtggtaactgtcaacatgctctgcatcgcaaatgtgcaatggaatggtggaacgttggcgatgagtgcccagctggatgcggttgcaattgtgtgaactttttcgatgttcaatagtaattaaatatgcttatatattcgtgactctttttctttataaataaactattttaagcaaaatgaacattcgctttttttctaagcattaattagatccaaaataaggtccacctcctttattacgatgtaaacagacagttattgaaaaagttttcccattttgggataactaagatccgacttggactcacctttaaacgaacaaaggtagactcgtataaacagggatgtgacataaatcttgaaagtgtataaaaatttatcaaatcaacaaaattatcgggacttctttctttatcttctttcattattaataaacatttttatataaactaaagtatctgactacggttataagaattgaatcaagatataaaaaatggagcgtgataaagttgcggtgattttgggagctaatagtaaccttggtttcaatatcgctttaagattagtggagcaggaggatccgcaatgtaatattacttttgttgttacatccagaaccaaaaaaagggctgatgaagttgccaaaaacattgaaaaaggcattacgcacattaaaagatcagggaaagtggtatgtgatccatttgttattgatctaacttctatggaaagtgtcaaaaattttgctgatgctttaaaccataaatacaagaaaatcaattatttttttaataatgcagcagtgggtctttgcgatgggatcaattggttgagagctgttttggaagtttgtataaatcctataaaagcggttaccgatcctggatacagaattcagaagaagggacttatttcgaaggatggaatgggttatgtttttcaagctaatgtatttggtgcttatttcttgatacatcagttattagattcattatcaagaggtacagcagctgtagtgtggatatctagcttatgttccacgtctaaatatttgtcacttgatgatatcgagctaattaattccagtagaccttatgatggatcaaagagagtcattgaccttttacatttagctacatataaacagttaaaagccaaaaatatttatcagtatgtagttcagccaggtatcttcattagtcaatcatatgcggaacaattaaatatattcacatattggtccatgctattactcttcatgttagctaggttctttggatcaatttggcatacaatcgatggttataaggcggctaattctgcagtttatgttgcaacctttgttgataaaaattttgaacgtcaagatttaaagtatggatctgctacatatagtgatggtaaagagtatattaaacctcaagagatagaagacactggtaagtatcaagtgtgtgattatttagagacaaagcgaaaggaatttgaaaacaaattaaaagacaaatagactttttatacaaaagtcatatgtcttaaaactaaatatcaaagagagagactgggacacaaatactattaatgaaatgacgcttattattaagttactgaagaatataaatgcagatatggatctaaatatataatgtagtatatactttatagattatgtaaggtagtaagtaatgattgaaaactctaaatgattttcttatggcttaatctttgtccttttcctcttttattgtatacgttttcgtatcttcttctaatttattatgtttaattaatatatcactcagtaataaatcttgggcctcctgctttttaataataagagttagcatcttttttatgtcactcaattcttcataaattttttcaaccgatatatttgagttagataaaaatgatgttttattcttcatggtatctagtccttcataggtttttttagattctgagacatcaaatcgaaccgatttcttaggttcctcttttttacttatcttagatatcattttatttctatctaatgcctcaattttactcatttcttgtttcaatttcgatataatatttttacctctaattggtgaaagatctatgggaatctctcgtctaggcgatacaacgctgtttggattaggtatcaaagaaggaaaagatgatgatatatccttatctttagtttttggttttaatggagaattatacgttaacgctcgattttcagagactgcaagtaaattactaacattatgtgttgtactttgactattcaacctatcttgaatcctgtgttggtatgattttaaagcatctggggactcgagtcgtttaggaggtattctataattttgtggacttgtaatttttcttggtgaaagtctcattgcaggttttcgtaaagaagttgaacgtgatggtgatgtgtaagacctagttactctttcatgcaacctttctgacatttttagtttcgttatttctttttgttttaatgaaatttaaagaaataataattttgcgcttctttttttttgcttttttgttcccttgccagatgttaaaatgcttataattgacttttaagtattatttggttactaatccttgtgaactatttatttgtttgttacttgaatctttctttgtaatgttttaaatttgtttattcttttagagttttcttaatattctttgtttttttttttttttttttttttcattggtctccgtgtagcatcatttatcttctctatttatttattctacattaatgatattaaggtggtggtacaatatgataatataattgaaaggaaagagtatgtaaagtttaaacagcaagttatataatattcctatccaattgacagtcaacttattcaaataatgattcgttattaattaattcatacacttgattacttttataattatgattatgaaatattggaatattacatctttgctgttcatcgtattgaataatcatagtaggtaaatcattgattgttaaatactttaaattagggaatcttataatgaaataatctaaagttttttttagagaatggatataactatggtataatttaataacatcttcgcatgtcacatatcgatcattatttggtttattatcgtaacctagcaaatagttcaaagttttcacaaactcttcaatgggccttgagtagaaccctatactaggatatatatcaaaataatgtgagtatggaacaatagggtacaatttaaacatctgtaaaataaagtttcttttctcaatgtcattaaaatctttgatcaagtatgattcattggtggggaaaattttgaatagtatgatgttatttaatgtgtcttggcaagcatcgcattgacagctcatatttatgataaactgtgataattcatcaccctcatctatagatagtaaaggatactgattcaattcagtaaatttgatatccaaatattctatattcttatggcacggtgttatagccataagatcaataactgacttttccataggtacctcaaacataaagtcaactttgagtcttcttaacttattaaacttcattatacagtccttaatgtaatccatatttgcaaaaagggaaaagaatgataaattttctatatttttaaatgagagaaattcccttaaattccataattcatatatatcaatatcagaatcatattcgccataccatgataatacttctaattctttcaaactgtttatatcaaaaatatcagaatatttgatatgactgattttatcgctctgacatgtgtctggtcttaaatttaaacaaagactttcaatgtttaagggtgggtttaacttagggaaaaatttgcaagcatttacatgaatatttaattctttgatttgactcaaattataacttttcagtaaactttgcgttctttcaaagtattttagatctgcgctttggttcaatggtaaaatgtttggtggtggcaatgtcaaagtttgcaatgaatatgaatgatgaaccaactgattcgatattttgtccctaatgaaattttcgaatctggtcaaattatgatcatatttatttagtaaggaaatgaattcggccataatatcttcatctaagtgccacgtacaatggacgcattgaatcaaaggacataacttttcaggtgattctctgagagatctgactaaatgctgaaactttaattttgccaaagatttttgattctgatttgcacctttctctgaagtttcgtgcacatatttaaaatacaatattgaccatttatgtgttcctaaagaattatctaaatcgctcgggaaataatatctttcatttaaaaaaaggttttggtacaatgacggtataatactttcataaacgttttttgaaacatatgttaatgatactttatcctcctgagctaaagaatgagcaatcttagagaccacttctttaggtaatctatctaacattttatacttttaaaatccttggacagattaaataaaaagaactaaaaaaaaaaagaaaaggaaaaaaaaatccaatctgaactttttatctatttgtcaatattgtcagtattattttttctcgacatggtatttccttaatatgtagttttgttataagtatatattttcaggtaaatcttgcgaaagctttatatgatctcgtgcctttgatttctcgataatatttttcactcccttcataacgactgtcagtttttttcctattttttgtaaagtttccaaattgttttaggtgtacatgtttatcaaagtattgattgacatctatgattgagctattgaaaataatacagcaagggttgtataacatctaccagtaacagcaccaacaagtatcgcttaccatcatctatacacgattgtatatgtgtgcaggtttattggacaccaaaatattttctttctattgattatggaatatacaaaaactattaaagagtacataagatagaaatgctgttgtattaataactacaaaatatttaaatagtgacacaaatataatattttttgttttttcaacctggatattcaattttcataaaaattctaattgctgaccccatactttcaaagtagtgtatgcctgtaatttgactgctaaaagaacaatagatttgcttgaagaatcgatcgccagtttccaaatggatttggatagatataaacgttgttcttgtgcatatttagaaaatttagttgaattccctaagtttaatgtattttccattatcttattgaaatattcattaagattccccaaatagctttgatcattaattacaatatttgcaaaatctaggcatgcaggtataactagatttgcatcggatcttataaaattgtgtttcctaatactatcaacattgttgttggttgttatttcaggagttgaataattaattttgtaatcttgtaaattgacatttttcaatttcaatagagtggacccgaatacggactcgaatttcttagcaatatttccagtgaggtttaagtatacttttgaatcaaccttattgaataatattgaacattctttcgtgtttaattggaaattaagaactctttcataatcatcaatgaatggccttttataacttacaaaattccaattagaaacaattgtggatggctcttttatcagatgatggtttatagcattatcttttaatttaggtttctttaaagatggttctctagtgactaactttaattcagaaacatcattgttattattgccattactattaacgttatcagatacttcaaatatatctaacacttgcattgtgcagggtatcactgtatgattatcagatatcacatcataattttgtatggaattaatataagacacgttttcattattgttgttgttattatcagagtgtttaatagttataccagagtcagataattttgttttaatattaagtatatatgtatttgttgtgtcatctaatactgagtaattaggcacgaccaatccacgtttcacaactttatataaatttaaacaaatctcttctgtgtttagaaatggattgtattcgacatgacatttaattaacctttgttctaaatttaaaaatctataaaatttacattcttgtatcaatgactcccttagctcatcatcaagatgaattctgcaaccgttcagcagatctaatagcatttcaaaatatacaggcgatcttgggacaaaggaataggaatgaggtggaggtcttaacagttttttcaccaggatcaaattttcgacatcgagatataaggaatctgtggtaacttggaaataattttgattatcgccatttcttctcagaagttctttaggaaatttaaatgatctgtcgccgattcttgaataaaaatattcggaattcttaagaagagctttcaaacgaggcaaattataatagactgcgtctgctattaacatggtgtattctacttcatctttaatatttatgaaataaccttgcaaatgttggtaaattaaggaaaagatctgtggagaccggtcaataaataaaatatcattggattgacgaaaattcgaagaaagaactccactgaaaattgaagttgaagttgaagttgaaccggatacatatgatcttggggattctgaattattgttctgattattttctgaatccttttttataaaataattggtgaaatagcttggtccatctgaggaaagggaagcaccagatattttgaataattttgtgccgatttgaatattgtacattttgtcgtgtggtaaaatttgtggaatatttgggtcaaaatgaccttctacaattgaaacattggtacttgccattttgttttttgagaaatgggttgatagtttatgaatatcaggaggctatccagttgtacatataatgatgtatgttaattaaataaaaattagaataaaatagcccttctttccattgcaccatttttccgatatatttattgaacaaatataggaaaaagagaaaaagagaacttagaagttaatatcattataatagatggatagataagtagatatatatactttaataaacaaataaataaatacatagataaataaaagcaaaaagataaagcgggaaaaaaaaaccatctaatctgatataaaccaaacagaagttattcatttattgatagcgtagtatataaataataaaaacgtagaagaaaacttttttatacattcttgtatatataaaatcaaaaaatgaatgggtataaaataaaagttacactttagattaagtaaaagaaataaggaaaccctttcacgactttattaccacagttaaacgatagtcaataaaaaataaaaaaaaaaaatagggaaacaaaaaagcatattgaataattaattaaacataaacatgtaaaaaaaaaacttatgatatatttttttcttcttctatattaaatgtaaataaataagaaatagaaaacaatctaagttaaattaaaatatattttttatagacagtctgggattacctataataataaagcggcaacaccagcgactaaagcaccagcagctggaaggacttgagcggcagcaccagtgtaagaagaaaccttagcagtagaggattcagtggtcttggtggaggtagcgtgagtaactggggcgtgggtggtgttgtgagcgtaagcgtgagagacagcgtaagcttcagcagtaagtggacaccaggtagtgtactgagtgacgacgttgttgatggtgacggtggcagtggagactaaagctggagagacggtttccttacaggcgttgtctttacaggaagtgatggtgattaaagtggtttggttttcggtggcggtggaagtggtagtagagttgtagcgagcgttggcaacggcagcgacggaagcgatagtggctaaagtagagaattgcatttttatgttaattattgtgtgtaaaagtaagaatttatttgagcgagtgacaaaattttatttttttggttgattctttcttattgaataaatagagagacaagagtaagtatagtaataggagaaaacgaaaaaacacgcaaaaacgaactaccttcgaagaatagtagagattgaaagacagaaacagagtttgggaggatgcaatgccttgggtagagaaaagatcacaaatatctattccttatatataatgttagttggaactgattagataaatgaaataggacaaaccaaaaaaaacaaaataaaataaaaaaaaaaaaagaaagagagagaaatcgtgtagttagcaacgcgatcctcaaagaagaacaagaagaagagttagaaagggaagatctctcatagtgacagcgagacagtgaaactggaggaagcggggagggacacaaacagagaaaaagagagaggagatggtggtggtggacaggaaaagattgctaaaaatagattctcagttatgtttttgggcgttccctatcctaatcgggaaagcacttgttttcgagaagaaggagagacttcctaaagaggaaaactcagggtgtttatgacgcgatccctgacaatgtttgtccttttgttttcctttgtgactctttgtcttcgtgtttttgtctttgttgttggagtgttggacagaaaacaatgcagaacaatacagcatcgtccatgacaaatgatcatttacggtgtgggctcctcctcccccgtgttgtctctttcctttttggatcagcgtgactgtgttggctagcccaaaagggaaattggtctatttacgttttttttgtttttcgcttttttgtttttttttttttttttccatctttcaatctttggttgctctgttcaaaaatgacgccgccgttgttttttccctcttcaacatcaccactaaccaaccaccacccatcattaccatcaatatcgtcttttttctttgtcttctctttctttttttttttttttttttttgttaatttcttttttgatgtgcagagaaagattacttcaagatgaaaagaaagaaaatgatatgggaacaaacaaaaaaaatacacaataaaagaaaggaaggctagggtggtgtatggatgtgtgcatttagtattcttagcatttctaaaaatactttatccgatatactgagggatcaaaaaaaaataaatttatatactacaaaataaaagatagcgcaacttgataatgtcgaatgtatataacaataacgtgagcataaagtcagtcaactacgtaagagggtttgtatcgagtaacaatttaaagtgtgatctagattcgtatgtgattatcgcgtctcatctatttttctttacctctatctccgcacacatctatatatatatatatatatatataaatgtgtgcgtgtatatgtgcgcgcatgcatttgtggtaacactttcagtcctctagctcttcattttttcttcaataaacctgcctcactacacaaagagtagaatagtgaatcggtacggcttaataagttttctggggtatcgaattcggctatacgaccatgatctaaaactatgattctatcgttatccatgatcgtattgattctatgtgcaatcgtcagaatagttctgtctttaaacgcagtacggatagtctcttgcaccacttgatctgtttccacatccactgccgctgtagcttcgtccaatattaaaatcttcgatggaatcagcagtgcacgggcaagacacattaattgtctttgtccaacacttaaattactacctccttcattcaatgcagattcaagacctaatggacccatgctcatcacatgatccttcaaatgactcaactccaatgctctccaaatggcctcatcagaatatagatgcgttggatctatgttttcccggattgtaccttcaaagacctgggaatcttgtggaataatagataatttatgccttaaatcatataaccccatggtatcaataggtataccgtcgataataatttgaccagaggctgcctcgatgatacggaataatgccaacgttaacgacgattttcctgcacctgttcttcccacaataccgatcttctctcttgggttaatcgtcaagtttatatcccttagcactaaatcaagttcgggtctgtatcttgtagaataattcctgaactcgatggatccctcttgtggccaatccgatggaggtctcttgttttcaataacagcaggcgcctcactcttgatctctgcatactccttgattctttccaccgaaactatattggtttccacttccactgtcattctaacaatccaattcaacgtttgcgtgatctgtaaagcataggataacgataaacctaccatccctgcagtcaacgtgccttcacctaatctaataatagccaatgtggcagcacccaggataatcacagaaccgatggtctctaatctgaatgctaaccaacggttcgaattcaccgatgggtaataggcacttaagttgttgtccactctacattgatttatatggctgaatcttgtttgctgtccaaacccacgaatagtaaccatcccacccaacgtttcttgaaagtgcgagtaaattggtgacttcgttaaagattctaaacgacgtaattctctggaacttcttaagtagtattgttggtaatagatgtataatacacctaatggaatgatgataaatataaattcccacgtggtccagcagataacaagcatggtgaaaattaccttaactgcattgaccaaaaattgcgaaaatgttcttcctaatacagtatccactttgtaaatatcgttagagaacctgttcaagatacggccaatcggtgtggtctcaaagaaggacattggagctctgaatatagcatctgtcatgatgccgtgtaggtatttagaaccatgaattgtacagaaaacccataatatcacagtttgaatcagtgttgacaaagcagacccaacacctagagccaaataaataaataggtaacgccctgcattagggttagcattatatttagtattgatttcagaccaatgttttaaccacacactactcatcacagttaaaaacatggacaaaataatgaagccaattaatattataacgttacgtggattgcatgctttagcatactcccagtagatggaccattttactttaccttgttcacgatgttctcttctctcactatcaccaaaatccatactacggagagttgcatcactagctcttcttaagctgcgtgaatcttcctccactaaatctaaatcattcaatttctttagttgttctaattcagcttctaatggaacactatcttcatgcttattttcgatagaagaggcagaactagattgaatctgggacgtagagttagttttactatctttcttaccaaactcgctaatcaatttgcctaatgcggaattttcattagatgtaacctcatcataggtaccatgttccacaatttcaccattttccaataatgtaatagaatcagcaatggaaaggactgagatcttgtttgttgctagaatttttgtcttcgtatgtaataagccatgaggacctaaaacatgttcaattaaatgtttggcaacatgttcgtccacagcagctaatggatcatccaacaagtaagtatcagctctagcatatacagctctagctaaagatagacgtgccttttgaccaccagataatgaaatacccttttcaccaactaaagtattatcaccgtctactaaaacagctaaatcaatagttaaagcacatgctttaatagtcttttcatagaattcaggatcatacttatgaccgaatagaatattttctctaacagtaccgttcataatccatgggacctgggacacataagctatagaaccatgaacagtggcaaatcccttaactctaaacaaatcacctaataagctttggataaacccacttttaccacttccaaccttaccgacgatacatgctaactcgcctttcttagcttgaaaattgatattttttaaagcaactttgtattcaggtttacgtttccacaaaaaggtggcattgtcgccaacattgacagctacttcaccttggtttgtgaccttagataaatgttgaacagaatccttttgcaattcttcattagttaagaaactgaataatcttttgatggatacagagacttcaataaaggaagttaaaacgtttggaatgacgaataatgggaaagatagtaagttgaaaagggttaacgctgggaaaactaaatcaatagttaaagctcttttttctgtgtagacgaaaacagcaaatgttgagcatgagaccaaaaatgggacaatattgaattggaaggttgtcatagccataaaaacacctagtttagttaaattggccaattcctcgtcatttctaacatgttctagtttttccttatatggtttttcccaggcatatagtttcaatgatttaatattatttaatatttcactaattacactagttcgcttatctttgtaaatcatttgagtcttttgtaatttcttttgaatcttaacaaggtaggaattaaatggaatcataataaccaggattacaacaccaatccacatagagggacccaataatttgtccaaagatactaaacagattacgatttggaaaggaccagaccaaatcaaatggaagaattggcataaatcttgtaatttttggatatcaacactcattaaatttacaacatcaccagtagtggaagtggcagaagcttcattagatagaactaaggctttttcatatagcatgcatgttaaagcacccctaattttcataccagtgttgaaagtgtttaagaagtactgatgaagaacacaggtttgagtaaaaccaacgataaacatacctaaagcaatcataaacccacgaaccagtggtaatcgtttcaaattatcaaacaaaaaaacgtaagaatcggaagcctttctttgttcattatagtcagaaacgaacttaattaaaattcttagtagttgtggttgtgtgaaggctaaaatatcatgcaaaactttaaagaaggcagccaatagcataactggaccatatgttttgaataaggcccaagtcaatgatggattggttttatgtttaatttcattttcccaatttctatttagattcttggagacttcttttgcatcaaaactttctggtaatttatataaatcctcttcaattaagtatttttcataaccaatcttcattaattcagacatccaggtgaaagaaattctagagaaaatgtttgcagtatcgtttgggtttggttttcttctcgataaatattgttggatttcatggtatggcatgataggtttagtgggcagagcttcaattaacagaatagatatagataagacagtttgaaaaacagtgaaaacaaaaacagattcattgaaaggccattccccttcatagtgatgtctaatgaaaaaattaaaaaatttagcaaaattaccaatactttcaaataaccagtagaatagtagaataccgttagctactctacatttatgatattcgatccagtgtaaagataaagcaataaatagtgataggagagtaaaactgtattgagttatgacagttaaatctttacctttatgaacaggtaatttcaaaggaatccacgcagtgaaaaggatttgaagaagtatcaataaaattctagtaaaaattaaccaatttcttctatatttgataccaaaatttttccttttaactaatctaacaatttctcttgaaccaaatattatcataaaaaaggaagttaaattaagcaaaataccatcaataaaacattgtgtcaggtcaccataatatgagatagggccaaaaccttctgaagaatggcatgtttgacacccccaagaggcaattctatctctccaattcgtctctacaagcatagtattgctaaaaatagaataaatggagatatataaatgtaaatgtaaatatgtatatatatagagataatgatctttttagatcaatgtgctgatcttgctatatgtatcaattacggctgtatgttgtaatatggtaatggagaaagaataatatcgtaatgtcgaaatatatagtgtataaaggtgtttgtttgctattggtttagctggtaaggatcggagatatatatacgtgtaagtaagtgtatatatatatatataaaattcggctcttcttatcatattagtaattctattttgtcagcctttagttttttttcttttttaattgtagaagtatcaagacaggggaaaaaaagaagaaaaaagaagagaaaagaagagaaaagaaaaaaaaatggaagaaacaaaaagaactatttactaggcgaaatgacattacaattaaatattcataaataaaaggatatacagaaggtgttttttgaagattctatttaataatattttggtggaataatactaaggaaacatttttaacattacttgtagcaacagttacagttcacttgatgctgtgctgtttattgctcatctcagataacaatattggatttttttcctttttttttctctttttttttgttcttttcctctgagtgtaagattgcttatcaaaaaggtttgcagagtgaaattacaagttgtgaaagtattcaagtgaacaattctgtgaaaagatcaccgtttgagttcatatctcagagtcgaggataagcaaacaaactaaacgtgtgcacatatctttgatcggaacggttacagggttcttggtatttaaattcgacataactaaaatatgccgatgtctaatgagttatctatatatcattagttcaggtgggtcaagatatgtctttgatttaataatcatataagagtttatgtatatatactcttgaatagtgaatggtatacatttccattatagacagctttttacgaatattaattttagaaacataatataatgaccctttatatcatattatttacatcatgtagtttaagaaatcttgactatatcttccctaaggttgtttttccatttttgtggtagatgaaaaatggatatatttcttctaatgttgcgttttcttttgataataatcatgagttggagatcatcaacaataattgtccaagtatctgattggatgataggtacagccatgtttgcacttgttggtaataagacattcaatttgattaaagaatttactggagagtgataaacataatcaaatcttgttcaattaacttttgatgattgaggaatatatcagaggtggttacctcatttaaatatatattagtaatgattctaggtaatgattcttagtagtaaacaagtacaatattacattataaggcaagtttagtaataaaatattaaggttattatttaatgttacacaagatttaagtaaaaataattatatctatactaattgaaataatttttctgcttatatatgaataccaatttttggaaggacaaacaactctgaatgttgatatggaaaagcttaatggggaattttgatatatgtagtaggcagggaacattgagtgtctaagtgaagaactcggagcagctaaacacctaggtttaagctatgtatgtattcaaacaaataatttcaggattaacgttggtggttaattgctgaaaaacttatataaaagacttctgattattgaaaatgtatgtcaaagataattaccagcattaacgtatttatttctggtgttggattgtggctaagagatatctgtttaataagaactgtaataattttataattgatttactacttaagactaacaactttgtggcttggaagtaattacatatgtttagcagttatattttaacatattattgaaggtatcgtcttatgagaaattttctctttctaactcaccgaaaaaatataaaaaattgcccaattcataaaaagacggaatataagctcaaagtcttaaaccaaaaaatttaaccttcatatgtgtcaaattttaaattcaataacgtttgtacttctcataatttaataatctatctcatatttatcaaaataatacacaaccatatttctttacttttatttaattactaaaaaaagttcaatacctacatacatgatatatatatattttcaatacatttctttttctttaacacattaaagaactataaaattttttaaaaaaaatacataaaattacatgtagaaacttaattatgaaaacactattaaagaaaataaaatataaccgtaatattattctcttgagtgtgcttccagagcattaattacactcaacttttatatttgtgatatttttgattatatactttaactttttcaatggcataattcttcttatatgaatttttatttgaaaattacattataacaattaacaataattcatcatttctacatctgtttccctcccaatgttaaaaactctatgtatatctacagcctgtaaattaattcaatgtaggaaaaaaaaagaagcaaaacaagaaatataccttttcttttttcatggaaccctctatttctatcgatactttgttgctatttatacgtaaaaaataaaacaaaaccctaatattttcattgacgtaatattgaaaaacaaaaataagcacattactagatagagaaccagacatctaaaattataactaccaacaactagagggaactaaatattattataaacaaacaatacctaaacgactaatcatcaattaataacacttcatcatttctatacagaagaaaatagataaataatagtaatacgagctataatattgtcatcgtacatacatatatatattctatcattagttatcatgcatacacatcgagctgaatcatttctaatatatgataatgtccgattagagattgtacacgaatccaatccattctttgcaggtgaaccaatatctttaatattacgattgaaacatttaggatctacaaaagaatacgaaaaattgaaagccgacattcatcagtatcatcagaagattgagaatgaattaaattcaaaacaaatccatttaaatgaattaagtaaaaatcagcctgaaaataattcatcttggtcctttgtctcattactgagaaatccctttatgaaaaatgatcagttaaataataatgtcacgaaagaaatggagcagttgtctctaaatgaaaaagtatatgttaaaagtttaactaatcaattacaataccataaaccgataagcttaatctctgggtttattcaaattactggcttgttccaatacaatgtatcattaatcaatgatgataattttaaaaataagggtacaaagattgtaagtatcctgaaccataacaatactgacacaaatactactactactactaacacaatttcaaccactgaggctacaacttcttatgcaacgagtgatgataactatactgattataatattaataacaataccaatattagtaatacgcacactacatttcctccctctttaaagaataatacaaatagtatagacaattttattaaatattctaactcaaattttgaaaccatgtcctcactagatgacaaaacagttataactcccaattctaagttctcatatactcatagtcaatacaagcattcagacacaactaatgaatataacgagttgcctctatttttgatcccacagacactattatttccagaaatcatattacaacctggtgaaataaagagtttccatttcaaatcctcaaatttaccgaaaaatttatgtccaagttattcaatcccattaaataatataagaataaattactatatagaatttggtgttaatgttattacacataaagaaatcataccagttaatcttaaaatcccaatttttatatctccatttataaataaatggagtcaacaatatacaatgatactggacaacgtaacacatattatgcctcctgcaacagtgaaagaagttcttaatgaacatccaaaaagaatcacttctactacatctgtattttcaaacgatcctatgactataagtaacataagtgatagaaaaagatctagttctgtatcttcatctttttttagtaatttgatagatgtgaagagtgataaacatgatcaaaagttaaatacagatccaattaatctattaaaaaaaaactttgtagatataataagaaaaaatattacaaacagtttagacattgatcaattggtaggattacaattgaattatcaatttcaaaaaattgacaatgaaaatgaaaatattgttactgactttagtatattacaaagaaatgataaacacataacaagaaataatatttcaaactttaagagagctttaccaaatctaaaaatcaaagataccgagaatctaactaatgtaaatactgataataataatttaaccgatcaaaatggacaacttgtaccacaattaaatagtaatctgcaaaagaaatttattgtgaatagagatggaaaatctattgctcaaatcaaattatcgaaatttttctatactattacagacgatattaatctaataatatacccagaacgaacttcaaattttcaaataagtgcagtgaaagtttcgttacaatgtattgagttatttaacaaactttacattttagaaaaggatcaaacaaaaccattttataaaacagtatgtgaagcacatacagtatgttttgataaaacagattcattgccattaaagttgatacttccaagaagtcccatgaaccatttacccagccaatttaaaaccaatatttttgaaattaaatgggtattaaagttcacattcattttgattgataaaaagaataataatactaaagagttattttcctatagtgggcgccttgaacagttctatgaagataaaaagggtgctttgtatcattccaaagaaaatcttaacggtttggatttcacattcagagtacctgttgatattcttccctcagtaaatgacttttctggtttataaaggattatggttattggtaaataagattatatatatatagtcatatatagatagtatttcaataccatatccccttttcttcattaacaaaaaatctatgtagtaattctattaaatcgacaaatattacttaaaagacaattgccctgatccctaataaaattacttgtagtaatatatgtatctgtaacaacatatgattaaaaagatatacgattaatgagacctaattaatttttcatttttattttttttctttaaactatttatcaaaataagaagctagaaaatgaaaaggcacgccagaattaaatatcaaccaatatgccgttgaaaaacatactgtcgattaaaagactttgatctattatattaatcatcaatttaaaatatcttagtggattttatagaatatttggcatactacaaaaataatagaaaagttttttcaattagtgagatcaaacgaaaaagcaccaatagaacaatcatgattaattgtgataacactcttcaagagtgtagtaactatgttcttaactgtataaattctatactgacttctaatccagaggtaaatattttagaaaatccaacaattgatgctttatttaataaagaacttttacaatatagttggaaacccttagagaatataaatgtatctgatttaaacaaagatttgctcgctgatctaactctgaaaaaaataatcactgacctatttacagttgattcagaagctttaaatttaagttttgataatagtaataataatgatgatggtactacaaacaataataaggggtctactgatgctttagttggtaaacttcgaattgccgctttagttttggatttatgtttccattctagacaattcagacaagatattacatcatggaaaattacttacttcgatttatttggactaacaataaatttattgagttggccaattgatatattcaaattttggatatatgcagagtcacgtattgaatggtttaaaataggtaattctgctgaccctgatcactataatggtatgtctcaattaattagttacaaaccaccattatctgacaaattaagacattggaatgatatacttaaattattagagtataattctgctttaaatacaccgttagattatattatgaaatataaacttgagaaatttatatccaatttgttgccaattaatgaagaatctaatttcaatcgctctgctataatttcaaagagacaagattctggcactacttggaatgctagaagacttttaggaagacctaacacttctgaagaaaatatgacacaggattataagtttgttttcaataaattcatctcctcaccagtcgaattcacttttaaatcagttgattttaagttagatgttgaaaaaccattgtatttattactagatgctctttttgatacggaggatgatttttataaaagaataaagtacattcgtagaaaacagttactcattgaggataaaataaatccaaattttcagtcagacttcaatttcaacagtcatgctatacctggttatatgagtgaatctgtaatatttcaaaatgacagaactaaaatatggaaggacattgaatcatttcataacccatctctacaaattgtaagacctacctttttagatatgtcatcacaaaattattctgtattatataaacaattaacaagtctagagaatgactattataggaagcaatttatgttacaagtaatatttgcttgcaagattatagaaaaactactgactatggaagatgtcaaggccttttataaaaattgttatgcaaaggaaaatatgttaaaatttgtaaattttgacgatttagatgaatcgaatataagaaaaaccaaatcattatgccatcatatttgtgaaatgcgtgtaaagacattttatgctactagagatccaatcttttataaaattattcattctttagaacaaaatgatgagttatatataaatgctaaagttgatggattcaaattttttaataattgtaatctatctttaagcaagaatgaaaataatcatgtcaaggagaatgttaattatcaatttaaaaaattcggatttattaaattaggtaataaacaaattaataatgtatggaagattcaaagtggtttagaatcaatagcggaaaatactattgatccaaaggacatatatgaccgtttaaaggaaagttataggaatgataaccctaatacaaaggaggcagatgaaattatgaaacaatggcagacactacgttctttaagatcccaatatctttttgagttcaacaaattcaatgaaacgatatcattgaaagatttatttgatcattctacagtcgaaaataatacaaaggaaatggataaatttaaagaattccaatcaaagattaaagagtctcatagaaataggttgaaaaaggcaagagaacatcaaaaggctaaggaagttttaaaaagaaaaatagatgatgttgagataactgaaaatacaagtgaagatggtaccagagaaactataagtaatgaaaataaaaaactaaaacgagatgacaacatagaagtgcaaaaaagtgtatctcctatattaaatgaacacagctcagagagtgagaacaacgaaaatggaattaatgagcaaccgctgaataaagatattacaattgaacaattgaatgaacaaaacagtttggataacaaaaataataataaagaagaggaacaacattctactattaacactcagaaagataacaactttaatctgaaagataaatcaaccaccaatgaacctcaaaaagaagacaaataaaaactacgcatgactaacaccaaatattacaattacttttatttattaacagaaaaatgaaacaatatgcatataatgtcacaaatattggacttctaaattatttaagcgtattaagaaattatgatgtcaaaatattatcaaatatctttatttttatataaatacttaactctaagagatattattagaggagagtaagtaattacatcttcaaaatcttttttgcagttaaaacacattttatgttccattaaatctgtataaatggtgtgtttataatatacatagatatatatacatacatacatgtttgaaaagagggaatttgttatgtacctactatctatattaatggtattaaagctagaccactataattcatcattctaatccttttaatgttgcaaatcttctcatagaaacataaattcaatagccacctcttaaagtcaaaactaaatgaagttgagtacctggtttcaggtgagcagataatattgtgtcatcatctgaactacaaaacaaataaaatgtaataaaatataaataaacaatacaaatgtaaactcattggcaataaaaaccattataatatacagaaagttagtattcattatcttataggttccaatatatccttgagtatacatcaacaggttatgatgtaagttcgaaggaaaatcaacagcaatatacacacacatgcctacataaagttacaagcacatgattacacatatcacacatacatttgttttccttgatatattagtctttgttgcactggaggaataccttctttctcttctaggagttctttaatacgatagacacgatctgtctcttctatttcaattggaatttcttttccagtcaacgtcctgactttaatctgcatgattctttatataaatactgtcttatatttagttaatattctagattaagttactgttgatgaactctccctctggatggattaataggcaactattatatgtattttctgctgttattagttactattaatctgtcgttatattttttcttttttttaatttttctgtctttacaaagttatgagataaaatacttagcgcagaaacaatacatgtacaaaaagacggcgatctacagttgtgttttgatgaaatgacaaaaggaatatactggcagtaactaacctcaatgttttacataaactaaactattgtatcgtcattagatttaagatagatatctgctcaaatttttgcttttttagacaacttagagatgcttccaaccccatacattaaatgcgattacaataaagtttatgaaccttcagaggacagttttttggtccttgattctttggaaaaagatttagtatatttaagagaaaaattcaaaaatagagtgacttttgtctgtgaattgggtcctggatcaggtatcatcacaacttttatgattcaaaatgaaattccaaatagatccaattctttatatttttctgtcgacattaatccatgggccctagatactactttaaccactgcaaagttaaatggttgttcagagactaattgttacttagaatgtatccaatctgatcttaccacctcaattagaaagagacaggtagatattttggtatttaaccctccatatgtacctgcagtaaatgttcctgagattccttcaagtaaagaaaatcttgatcaatggcttgatcttgcgctattaggaggaaaggatggaatggtcattacccaaagagttatagatcaattagacgatatactctctcccactggtgttgcctatattttattttgtgcgagaaacaaacctgaacaaatagtatctaacattatagagacttgtgacctatggaatattgatttggttaaacatagaaaagcaggttgggaggtactctctgtatatcgcttcagtaggaaataaataattgacgacatatacaaaaaaaaatagaatatatatagatatgtatgtatggttaatgaatgtaataataaaattaatggactacaccttcatacacttttgctataactctctctatgtatatatatcttctaataaatctttttcaactgcttcataatctaaagatttcatactataaatatcctcataatgaacataactcaaatttgtgaagaagtttcttagttgatgatgattctcaatttgatggacacctaaaagatatggtaatttatgatcttctctagactgaaccagctctatatcaccaacttgtgccacagaatattctttgaattctgcaatcttatccactagagaaatatatggatacgtcttgtaaatacaattaattgtatcaattgtaaacaaccattcattggttgctataaacccttcaatattcattgctaataaaagatctaaagttttacaaatttgtagcaacaaatcacagttgatggactgttgtagctgaaagtgttccaaaaattcttgtagatttgtttgaagacaatatgaaatcatcccccaatattcattgaaatgtgattcagaaaattttaataacagaactcttagcagaatccagcatcttatcttcaatttatccttatcagatactaaatattgacatatacaagaaagtaatgcttggaattctgataaataggtgttatttggggctattttaatcaataacgcaatccttttcaaattttgacatttaaccattacatcagaatcattccatgatgaaaaggtaattaatgatggtgttaatcctatctttttggacccagttaattgtaacaattcacttaataacctttccttattttcaggatattgtgaccactcatatattatggtgttccataaatctcttttttctgttggaatcacatagttgtcatctctaaacgcatcattgatgaactctttccatattttaatagaacttccaacttttgtaatcgaatatgctaacgataacatataatctgggatctctttttcaaattttctctttagataaccaaccaaacaattagcacaaatactagataatatgttattaaatctatcaccaccaataacatcattcgtcaaatatgcaacattatcaaccagtctttttagcgtattgaatgcttttacctcattactcttagaaattgaagcaaaatcatttaatgctgctggcaaatatttattaaaaatatcagaaatttctttcttagttttcttttgttcaccgaattgagtagttttcaatttttgaccaaccacattaatcagttcaataatatcgaagaaaatggctttatacaaagtgtggttgaatgcaatttctttaaagaaattaatgaaatcggtgtaaaattcttccacggctgaattttccaacgattttgaataggctgttaagaacactattaatttttcaccagataatttacgtatcaatgaagtggttgcccttgaacctctttgagaattcttataaactgagaatttaacaacactgccagcattatatctttgaatgataccatgaaaaaaataaggaatagataatataggcttattaccatctaatgcatgtataatagtaattgtttcataggtggatccaattattacaatattttcgagaacttctaatggttccaataaaaacattgtttctaacaacttctttgacctgaacttatatttataagtactataattaacaccacctttttcattttcatctgctatattgttagaagatttatgagaccaagtccatatttctagggaacaggcaataacttgtttaaatgcttgtataactatatctctctcaccttgtagtttgctatcgttatctaaagattcagagtaaaatacgttagagacaacagactgaatgaaatccccccttgtagaagacccagaaaaataactgttctcatcactagtaatgtaactatgtgatatcttaataagttcttctacagaccccattaacaaggaaattgcataatattgaccacctttctttttttctaagataaatagtcgttgaatacattgaataatggacgtgacaaatggtaataatatcgtaaaaattgatttaccaaaataggagatactctcagacaataatttaacataggatgttataattagaggactctcaatttgagatatgctggttaccatgaaatcaataaattttaaatgtgagctattatcattaaatatctccaactcaatattattatcatgcgatattcttaatactttcgatataatatctaaaatcgatactgcagtaacttctgaatctatattcttttctgaaatacttttagtaaacatttgaagtaagaatataacgaattcagtaaaattactctccgtaccatctaataaacagtctaatagaatcaaacaacttctgatactctctgcatgatcattgtcttttaaatctagaaactttaataagatacttaataataaagtcttgtaagtagatgtatctttattggaccacccttctaaagattgaaaggttgttggttcaatattaaaatttttaaccaataaggcagagttacactttaaaacgtttgtaatcattttaattctgtaggtaaacatatctaaatcatccaattcattaatcttcccactttgtaaaaaatcaaaccttaaaagattttccactaaaatccaatataatcttctaattgaatctgaatttaataaagatataacccatttagagacagccaaataatgtgggttttgttcatcagataattcatctaacaatagttccaatggatgtctaacaatatctaaatattcatccatctgattccataaaagttccaacactgttaaccttttagatatcactttttcctgtacaaagtttgccgataatgatgtttcaatatatttaagttccatattcctacaaagcgatttcagacattgaatagtaatatactgcctgtttggatcaaccatatagatccaaagagaaccaattattttatttaacagttgaaccgacggtattaaggaaagatgcacggataagtaattactaaaaatattgacaattccaataatcgaatcagagtgtgtataaactgttccatcttctaagacatccattatattcgtcactaatgaatctatgatccatcttgaatttgttatttcatgtgaatgttcttctttatcctctggaatcttttcaaataatttgactaacataatagacgcgttatttatattaactcccttcaagatatcactattcaccatgtttacaatattaaaaatcacaatatatgttaaatcaggtgttgaaaaaggatatagagactgttgagatgactctaatttattcacctcaatggaacctgaaacagatttgtagtaatctgttattgagtttaatgtattttgaaaatcattctctaccttattttttaaggttgaatgagttaatgggagaaaggctcgttcaggtataatatccaataaatttttcaaaagagaatgatacttaattcttagcaattgggaagtattcttattattcgtagcagtgccagtagagttaatatttattgaaaaatcattaatattgaaaaagcataagagtgcaaggaatattaaaggaatatgacgaacaattatctcttcatcagtttcgatattaaaattagataaaacaaattgtaaaaaaacaaaatcttttttgttgattatccattcgaatatttgaccccaaataatattagtctctactgtatcaaagaaagaattagctgaattaagtacttttgtatcatttttgaaagtttctgcagctttcattaatgggataaacatttttggaatgatataggaaccaatttcccatctatccataaataccaaacatattttaaaagcaataattaaatcatctttatcggacaataaatcatttaacgcatttatcaaagaatcaagcccatatttgacaaaatatgtggatgaagatgatgcctttgctgtttcatccttttgcttatctgttacattatgttgattaggtcctaacaaccaattccacactcttctattcaatgacatatccttagataaagtagtcttacaacaaactagaatcagtaattttctatcatcttcattaaccaacatctgtataacgggcgaacttaaatgtaacctttgcaaaaggatatctaaagtgcctcttttgatcaaaagatcgttctcgttatttaaagatgcgataaaagaacgaactaaaagacctggttcaggatggaccaaatttttggctataggcaatagcgtggataaagctatctctttaactcttttcttgtcaatagagtcaacattttgtttctccacgttttgtaaaagatgaggtacagaatttaaggatgggaattttttggtgaaccataccaaaccgcctagcctacgatctttattagatatcatgatgaggaaacaagtttgccaaaacagagaatcatcattgagattagcttgtaaagtttcaatcagagacaaagttaaaggtaaaaattcgctactctcatcatctatcccaggaaataaagaggacaatagaggtttgataataacttgcaaagtagcagaaggcaattggaccaaatatgtttcatatacttctattaaaatggatttgacagacattgaagcgtatgacatcaagggcaggattccaggaatccaaatattagtttcttgagctaaagtttcaataccgatcttctcaaagatatatttgtatacttctaaagtcttttgatgcacaccagcaggcaaatctggagataaggaagaggttagccgtctacttacttgatatggataaggtacataatatttgatgttttggaacttgggggaccaactttgcaatgcttttaacagcgtgcctaaactagcaatataatctgcccattctgtaactgaatcaaatctttctaaagctttattaatatttgaatggaattttttctcttttgaatccaaatgtttagtgttagtggaatctacagtgagcagtttcagctgtaaggacattttttgcagtatcttgctgtctatctctgtatctttctcacttatttatcaattgtggtgagtaggaaggaaaagagaaggacaactgattcaaatgaattaaaatgaagaatcaaaaggccaaagaacaaaggaaagtaacctcaaacttaccagctatagttatactcaatgaatctatgaacagcacagactgtaccaaatcaaaagtgtgtgtatatctatatgtttattctatgtacatgtatataatacaaacagtgtacttgcacacaactcccatctcactctatctttctatttctctgtcaaatataataaacatatccagccatgttggcttctgcattttttttcttattttaatcttttactatgacaaaaaaaaaaaaacaacaacaacataaaacacctgaaactcctcctcccacagtagagacaactttgtaaagattaaaagattaacaagttgggagattgaaaaattgagccatgtgtgtgcatgtgtgcttgtacgtctatgtttgtgtatttgcttatctcaacgcattccatatataggtatatccatcccatgcagtagtagcaactatacctggatcaccccataaactccaatctgctccaaatacaaactctgtatgtctggtcatccgctttacacagccatggtttaatgtatcatgagtcatattattccgtcccgtgtaagttttcccattgaaagataaatcattccatacacatgctgtcatgtcatatgatgtggtcatgaagtgatgactactatgtggagaccacttgatttgtctaacagctaacgcatgtccgttgataatctcattcacacatgatgtaacattattgttcaatcccttgaactttgtttggtcactacgtaacatacgtaaatcccatatcttgatcctattatccacgcctccagtagctataatatgtggtctgtatttattgaaatcacaacataacgtctctaatccagaattcgatataaactgacatattatattgttgttattcactgtatttatccgaagatcgtacaacgatacaatggaactacctgacgacgctattacaatattatcatcatgtggtgagaatttagcttgatatatacaatttttatcactatttaccatatttttggacttatcctcttgacttaaagtaaataaactattctcagttcttgctggggaccaaagtttgacagttccatcccatgaactactaacaaatctatctttattgaccaaactccaatcacaacttaacacctctctttgatgtcctttaaatatagcaatgggatactgtttcaaattggtgtcaaataaccgcaaagtcccatctccttgcgccaccagcacttggttcgaatttgattcattccatgccacatcaaaggggcaatccttggttagaaacgagttcgtctccaagatctgtccattcggctcaatgctcaatataaagagtttaccgtttccaactaacccgaagtttgatcctgttactagtgcaatcttatcatcataatatggggaatattgtaagttgtatccactgaaaccttttgtatagtattgtagaaacatatcaaactgggtatataaataaagaaacgagtaaattaataagtggatgaatatatatctaaaaaagtatcactttagatcttccgcatgtgtgtaaatggaaaatagaaaacatctaaaagcatggtgcggctatcaaaactatatactcatcactgcaaacctttctattcttatcaaagctcttcattggagtaacattactctgtgttgtcagatctagatatccttcaatgaataaatcaatagagctccctattactttttttcttcttcttgactagttttttttgttttttctgtttattttttttctgaagggaaagaaagaaaataaaagacaactcaactcactcttcttttatcgatattaataccgtcaagaataattactttctactttccctcctcttctctcttcccatctcttttcccagcttgcactcctaaccttctcacttgtacgccatatacattattattaaccttaataatatctaacacaaaagcacagaaatagagcagaaccgaacaaaacagcgttgaatatgtcagacttgaacaacaaggacacacctgtccaatctagtccagacagcagtacaaataataccaatgctagcacaactaacaccaccaccactaccgccaccagcaccaacaacaatagcaacaacaagtcttctagtcccgcggttaccactactacgccgagattgacccaacagcaattacttgaattgacaaacaaatttaaggaattggttacagaagctaaaagggtaggagaaactacacagagaggcaaagaacttttaattcaagcatcaaagataaaaaatatttatgataactatacaagggccatcagacagaggcaagatattcacaaatctaatattgcagccaattcttcgccttcactttcatctggatctgggtctggatctgcttctgcttctgcttctactttgtccactaataataacaataacaatcatatgaacatcggtacccctacctcaacggttaatactcctaccacgaacatcaacactccaacttctagctccaatagtaacaacaacaacaacaacaacaacaacaataacaataataataataataataataataataataaccaatttgccatgttaatgagacaagcattgactccagagcaaaatcaacagtacgaaaaattatcaattgaatttcaaacaagggcaagaaacattagagagaaacataatttcattaaacaaaatattgacactttaacacaagagattaacaaactgagtgatttagaaacaaagaaacaactagttgagaaaagatccgaattgcttaacactctaagacagttaagtcaagaacataacaatttaaggatacagtttcaaaatggcagaaaaaatttttatatagaatctgctaaaaacaaccctgatttacaaagaattttacaaagatcatcccagcaagccacccatttatctcaagcacaaaattcaggaattacaccacaacaacaacaaaaaactcaaaaccaatcgatttcaaaacaagatattgtatcccaaccaaatttacaaacaaagaatgagagcaccgataactctaaacaacaacaagtacaagcccagggacaagttgactcatcagcaaaatccaatagtactaatgaaacacaaaataagagtgccacaataaaatctctatccaataacaacgtcactactaatacgaaaactgacactcaaactgcgcctacaaatgataagaataatagcacgattaacaacacagcaactgttaagaataataaagctaataataatagcaacacctcagctcaagtaactaatgtcaatgcaactgctgctaccaatgtatcatactctaccacaaaacaaaaaatattcaaaacttcagaaccaaatattccaataacagaaaacctaactacaagacaaccaaatgcaataacatataaaataaatagaccaaccatgatgggtggttccgccatgagcgcagcttctttaaacacaccagtaatgacaaagatcccaccttatgagctagatactgagagggtaatgtcaaagaggaagctcagagaattagttaaagccgtaggtgtagatgaaggtgatggtgaaactgttattgacggtgatgtagaagaattactcttggatttagcagatgattttgtcactaatgtcacctcctttgcttgtaggttagcaaaacatagaagatctgacaatttaaatgtcaaggatattcaacttcatttagagagaaattggaatataagaattccaggctactctgcggatgaaatcagaagtattcggaaatggaactcaagtgcagtttacaatcaaaaattgcaagctataaatactgaaagaaaccataaaggtctaagcagttcaggtaaaattactaagaaatgaatcgtttaatatttatttctacgttaagctgtatatgctagctcaaatgtatgtatttatatctgcgggtatgtaatatgacaatctattatatatattatgtgaaatttcatttataaatatatatatacgctttacaataacaaaaaagaaaaaagcctttatcaatagcttattatcttgacttattgctactagattcaatagtggcattcataatgtcagcatccctttgcgcctttaacaaccatctttgaattaatttgttatgctctacatttaaaagtttaattttttcttgtaagacattattttcaatggtcaaactaattatctcatcattcaatctttcattattcttattcattacactcatgacttctttcagttgattcaactctttctctttattcattaattcattacggtatatattgattatttcaagtaattgcgatttagttaaatcaggtggcgatgcatctacgttatcatccttctccttgtccaatgcatctgcaatggggatattaatagattgaaataactctttatattgactctcaactgtatttctgaatttcaatctatttgataaagtattctgttcaagcatatttcattataatatgctgtatacaccttttgtgtatgcatgtgtgtctgtgtacctttatttatgtctatatactctggtagaattataacttttttttttatgctgaatctaaattctaaaatatatttctatcgcaacctttatttaaatcccaatataaagttataataaattattctatgttgaaagagtgcgtatatgtatacgctacaatagttcaataatgtatttacaagaatcagtcctgtagacataaatagatagttataaatacttaaatacttttcgaatagtcatttctacatatgatatattgaaacaaggatcaatatccaaacaaaatttatattaactaaaataggataaccatttaattatcaaaaatgaatcaatatgttaataatgaagaatcaagtaagccttatcgtcgttggtttggtttaaattggcctcaatctatttcacaaaatcaagaagaagaagaaaacaatcaggatgatgatggtgacacaattataaataatgagtcaatgaataataacaacgagagttggtatcaaaggttatatcattcaatattttggtattcaaatacacaaaggatacatccaataaagatagatgaaaatacaagatattcacagctagatttagaacaaattaattacttagaaaatgaggctttatctgtaattaataactacagcaactcatggtgttggtttgaagatttaactgatatagaatatactgaagatacatttacatgtagtggtaatgctgatcttgggagcactaataaacaagggcctggtgtagttagtgtctttgggaccaaatgtgggaaatgtccattacctttagacaaatcacctattgatacatgtttaggtgatcaagcttatgttaaaaattcaattttattaccatccttgacaccaagagattatttacataatctacctttaaggacaaagatagctaatgcaattaaggaacactataattaccctaatgaaaaacatctttatttaaagaaggatccatttaatgaccaaaagtataatcaggatacaaatgccaaaaatgaaattgaaaatgaaaaggctcataagaggcatataatatttactgtagttggttggttaccagataaatatgagaaattatcaattggtgaacaaagaactgcacaatatttatctcgaaaagttgcacaagcaataagagaaagaaacaaatccttaaaaaatctgtataagacagataataacaaaagtgaagataatgaagagatggagaataatcatgaaattttatcgttatcgcttgaatgtcctcttcacacaaaggatatgaatacggtattaaaagaatgtttatcattactaaaacattgggaaactatttttttcaatgcagactcaatatattttattggtgtatatcatagtgttccattattaatcgaactgtgctatacagttttatcacagaatcaaaggtatgggatcaacttaaatactacacgtatagggatgttaaccttaaattcatgtttaggaggttatagattttgggatcatagtgttgatcgttctatttacaaagaggagaatatttcaaacgataacaacaacaataataacaataataatgataacaataataataatatcgaaggtacggaatacttatctgataaagtagtgtcacaaaagaacagtaacaagaaatacactacaatgcagcttcctgaaataaatcaagaatacttaaaattagaacaatctaaagagaagcaactattctctggattaaataacaatgaaatcgaattattatcgagaattaaaaaatattatgatccaaattcagatgaatctaaacatatacagaaacgattagattggttattgtacaattgcgacacgtttagattaaatttgatagctacattatacgacaattttatgacaataacacaaaaactggcaatcaattataatcatccaaagattattagaaatatttggtgtgatggtaaatatcttgatattgatttacagagacccgaaaattttgatataccaaattttgaaatcaaaaccccagatatcaaatttactttgtcaacaccgacagatagaaaattcgaaatcattttattgaataatttgattttaacacagaatttggggtatgataagttcattacgattttacgattgattagtccacattttatatcaagatcgtttaatgagaatactattccatccacagtaagaaagcaaagaaataatcagacaaaacaatggcttcaagagctagaacaaaaatggaatggtatcaattcaaatattaataatacaaagagtaataatactaacaatactactataaatggaaataatgatattgatactgaagcaatgtatggcagtactttacctcaggatgttcataatgtacatgatttcctgaaatacatttattatcagaatattaaaaatccagaattgtttcaaatatatgggcaaatatacgatgacgatttgatctataggaatttcatagaaataattaatttgacaagaaatcctacacacaaaaaacatttaaagataattaaactcagcaatgaaaataatgatataaatttagattcccacatgggattgtataatagcatattagacacacaaaatcaatatgatttagtttggaagttccacgaaatgttatgtaattttcttaaattaaagaatttacctattcaagatcccagtatggatttaaagatatctatcaaactaggtacccaaacagagaatgacaatagtattattgttacaagcccaacttatgataatgattcaactagggttagtttcaaaagaaattatgaggagtccaagagacgtataacacagatctggagaagctaccagacatgggatccaaagactcgtggattagttaatctgaaacggattctaagtgtattgacttccttctctcaggttgaagatttgttgaaagacatcgaagaatgatgactaatcatgattatatcatccaaaaattctagtgcgcccaaaaacaggcaggatgtacggatgcaagccagaaacctgaaaaaaaaaaagtatcaagaaagaaaaaacgacaaagccgaaaacagaaaagttaaacttaaacgatttagtgataaaaaaaaaaaggaaaaaaaagtggaaaatcggccatattcataagaataagacataaaccagtttttagtgaagacaaaatagagggaaattaaggatttaatatactagtatccaatattataacgagcagcggttctttaccacattatagttactgctggcattattgtctgattttcctaataatacattttgtgtttccacaaaactagcatccacatatatacccaaatatattcgaaaagattgcttgtccaataaaatagataggtagatagatagacagatagctagaaatatacaaggacaaatgactaccaaatatactagcgaacaagagcaagtagcattggaaattctctccaaggataaacatgctttttatgaaattttaaagatagaaaggacagcctcggatggggaaattaagaaagcatataggaaattagcgatcaaattacatccggataaaaaccctcatcctaaagcaagtgaagcatttaaaattataaatagagcctttgaagtactaagtgacagtaataaaagacatatttatgatagaataggtagagatcccgatgatagaagtattccatccttctcagaaagtaataatggcactagccatgcatcagggtttagtggcggaattccatcgcaattttttagtaatagatatcaagcaggaggccctgaggatatatttgagtttttgtttaatatgaatggtatgggtggtccctttggcccaggaaatccatttatgcatgcaggtggcggcccaacaacttttacttttggccctggggggtttagagcttataccaatgggaatccaagagcttctgcatttcaaagacgacaacatgaacaacgagctagaagagctcacgataatgaaacaaggtatcaggaaattttacgtgtattattacccctattatttttctttttactacctattttggaaagattattctttggttaaattgtattcatttaatttaaactcaacaaaattgtatctatattttgccttccttctttaatatgatgcatattccttcttttttttttcttttttccattttcttttctttcccaatttatatcagaataatattgcatttgttagtcttactgaccaactatctttaaattatgtttaatcatttattgtggaaaaaaatgttattgtgtctagtatggaacagaagtaattactgaagcgattttacttttattttcttcactcactactcggaagaactcggattttatatatataatttttttttgcttcatttaatcttttactatcgtactagttactactcatctatatcaaacattaattgcatcagattacattgtgcttcctttttatcttaatcgaaacctcttctgaaaaaaaataatacctgattactctccaaaattgattaatatgttatatataatgacacttataaatccatagataaataaataataaaaatatatataaataaaataattcttcaattcagatttcttggaactgacagtaccattagaatattattaatatattggaacttccgacagacagcagttcttctatatggatgattacatatacgtattatataagatctaaaggaaaaacattttattcaagatctttcattctttctcttataatctccataacttcttcatcggtctcctcattattcaatttaaatcttaatttcttactaaatttacgtgttataaaatctgagcctgataaacgattagtattaacagagtttctattacccttcaaattcatcataatatctacatcatcttcatcaagtaaatcttgttttttaatcactttcccactaggcaaagtttcatacacttctggatcgtactctttattagatgcgccttcattgtcatttttcccaccgggtattattttacccactacattactccatgaagattcactataattaagttgttcagatatggtaggtaaggacgactcttttaatgatttgatgtcctcgtcaatatgattcactgaatttgttctagtccttgttcttggtttagacagtttcttattattaaatagttgactcttatatcgttcaatagaacttggatcatgttcccacgtccaaccttgtttcatttcattatatgcaccaaattccaatttttttcttacattactctttttctctaattcggcaaatatatctgaatcagtaggccataaggttcttttcaatgtttgatatacaatatctattataataggtaacacaaccaatgcaaaacaagtacaccaaaatgttatatctttaccaaaatgattataaaatccataagcaacatcatatatctcatcagttggattcaatataggtaatgcgcaacaccataccaaccatcctccagttgacaatagaacagatgcaaatgctatccaatttctatttctcatttccaaaaattgcgccttaacattaattaatacaacaatagctgtaaaattaacaacacctaaaggatacaaagttgaatctgataaagctgtttcaccccaagtaaccacatttaaaaacgtgatgattacagaattgcatgcaccctctatcatccattcaaggaatatccataaattaaagccttcacctaatctaccaaaagagtacaattcaggtatagttaacaacgtcattggtttcaaatccttttcaaagataccaatacaaagcaccggtagtgacgtaaaaagtgtattaaacatagataaggaccatgattcatacatagatgtaccggagaacaatgtaaatcgttggaatataacttgtgtcaaataaaaagttaattctttgtaaaaagtacaaagaacaaattttgccgttctaatgtaattatatcttccatgaacaaataataattttaataaatatctaaactgagcaatagagtaatctgaggaacgtgatgcttgcaaaccttccttaccagtaataccgacaccaatatcagcagcttgaatcatcgcaatatcattagcaccatcacctattgccagagtcacttcttttctgttagttttccggatattactaaccataagtgctttttgtgatggtgaagcacgacaacatatcactgaatctgtcttagtacacaattcaacaaagacagccattaatgtagggttactttcgaaagaaccaagagttgcaccatcaatcacaacaacacaatgtgccatattaccagtactaatttcttgactaacggcattcatttttgaagcaatattttcatcatccattgttaaaataacaatagtggagtaatcataaattaacttacatgagtaaccaatattaatggctgtttcacgtttgtcacctgttaacatccacatttttatgccagccctttttatcttttctatagcctcagaaacaccttcttgtaatttatcctcaatggctgtagcacccagaatattaagatctacttcaatttcttctccaacttcctccgtctttttctttctattaactaaggaagtctttgctttgtgatatttttggttccatttatcatacgttttgttatcaatccatttataagcaaataataatgttctcaatccttcagttgaaaaatcatctatggcttgaattgttctttctaaaatgaattcttcattagtcaaaagatcgtcattaccaatataggtttgtatatcctcatcttcaaatctaattttactatgattattctctccttgcaaatgactgattttatcatttttatttttatttgtggtatttgacccatatttttgcatttgttgtttatgcagagatttacgacttctcataattacatcatcaacttcccttccatttctttttacatcatctacaatgtcatcaatggtatctatatgcatatctgatggaccagttctatttctctgagagatactttttcttatagcttgtaaagataaacttgctctagtatcattatgacctgctccacgcagagaattacgtcctatagtttcatcatatgtcattctttccaatgattttctctgttgaacaattaattcagcttcctcctctttacgagtggttacagcattgttaatttcatcaattttctgaaatgcaatttctttattataaagtctctctaggataacattatcagcacctttgcaaatcaaaagaacattatttggaacatttggcattttaacaataactgacatcctctttctctgagaattaaattcaattgtatttaatatttcatattcctctaaaattggtgattcatcaaacccatttggatacgttttgattgtcaaagtttgaacattcttattaactactacacagcctaaatctctagctgcagtaattaaagctaattcatcaggtgaagatgactgatattcaattgcatcttcttcatcttcatgaccatcaactctctttggcaaacaagaatgacataatgccatcgatagaataaaaaattttgctttctttgaaaataacttatttggatatctttgaatatacctaattaagtcatatgaagatttgatattctcaattgtgctactttcttgagaagaaatagtaacttctgatgagcgatttttatgttgcctgatatacaaagagctcatacttggcctaccggtatatactgcagaagaatttcccttataatctattgacggtctgggttcatctgaaaatggaacataatcacttggggtaggtatgttaagatgttggcttaaaatttgaggtgcatttaaggaaacagtatcaatatcattgtcagtgagatctgtttgcagtgattcaactgatttcgaagaaaccattttcatatcatgtaaccaagatgaacctaaaaaagaaaatttacgaaaaatcatcttgttatctgttaatgtacctgttttgtcactgaaaatataagatacttgtcctaattcttccagaatagtcgcagttcttgactcacagggggtatctgtttcttcatgatacatatcaatatcccattccataagtttactctggaaaactttaattatttccattgtgacatataaggacaatggaatcattgtattgaacataataataaaggacataatagttgcagcagtcccagcgtcttgtctaaaaagataccatgctcgattaccatcaagagatcccctcttagctaatacattccctaaataagaaaagaacgaaacacatgccacaacaaaaaccataaaagcaataatcatgttaatacttctttgaagttttggtgcttttgttctaggattcttaatagcgttcattctaatttttgtctcttcaccagtgaaaataaccataccaatcattgttggagtgtttctaattatactacccctataaatcacattgtcaggacctatcggatattttttaaaagtgttatatttggtagcatccacttccaaattaccctcaaaattgtatagatcactgttaggatcttcaactgttaccttggcattaatattagataaattagattcggaagaagtaagtttggtcaattccatatgaggctgtctatttttcagatttgtttccccatctaatgccatggtttcaacatatacttcattattagtcccatccgatttcaaaagtagtaaatcagctggaacccaatcgtcttgcttcaaaacaacaaagtcaccaactttcaaatctttccatttagtttcaattatatgtgtattatatttgctagctagcaagtttacgtttaaaaaatgaggctttacagagtatttatcatcattcctttttagttcataagaattcctggaatacattttatcatgattgtcttcaatatcattatgttgttgattttgttgactttctaattctttgcttaatgttggatctttaattaaaatattcaccgttcttgcattttcttcattatcaagctgatgtcgcctgaaatcattccaagcttctctagccatagatatacccataaatactaataatgggatgattgttgtatatgtacccgtagttgaccaaccaggaatcatttgtaaaattgcaataacaaagaagtagatattagccactttagagaactgtgcatataactgtttgggaagaaatgaatatattgtatatcttgatgaagttatacaattattacaatatggcttgttcgttcgttcgtcaattaaaacatcactttttccatttgtatactgtctatattcagctaaggtgtgatctaaagtaattggaatatgtctcccatctttagaatgaagaatccttcgtctatctaacaataaatctaatgctttagtgaaaaaatttatttttgttgattggacttctttatgttcattgtcacccatagaatctttaataacattttggtcttctaaagattcttccattgcttcatacatctgtgaatcattatcccgcatatgattgcttattgatgaaatattgtcattatttttactactattattattattatttgaatccacatcatttaattcaatatcttctggcttatctttttctttccatttagagtttattttatcaaaaaaatgcttattgaatagttgggttcttaaagaacttgctctttttctgttactaccatttttattattggtcattatatcttactcttcgacatgaatttgtattatctataaaaaatactaaacgaaataaaataaaatacgaatttgaatataatttgaaatgagtgtgcaataacgaaactaaatggttggtttgttattcaatgtactcccaaaaaaatgtttagcatgggtacgattagcaaatttagaagttatatcaaaatgtttacttttcagtatttaattatttctttttttaaaaataaaacacagagctaactgttgcaaaaaaaaaaaaaaagaagaagagaaaaggacaagaaaaaaaacacgaagtaacgagaatttgttaaatttataacagaaaaatctataaggcaaaaactggcctaagactgacgattattatttttagtaatttagtttacaaaaataacaaagaaggtgccaactataatatttaactattaataataccgtacactttattacgacagcagtagcatagaaggaaattcattttaactaaaatagaaataaaattcaataatattatttatctgtaatcgatctgaaaaatcataggtgacaattaaataactgtaaacgtgacaaaaaaaaaactgaatatgcaaactttctttaaataaatatgctaactatattatcaatattctattaattcttttatttcgtagataatggggattgtatcttctgtagagaaggaattcgatattgttctaccattattgacattagtattatcttgatttacaacatttgtattttttttcgaataaaggtttttggggtaagttgaaaatgacagaattgtggatggaaatgtttgtgtcttcttattttgttgcttctttaatagctcgaaagatttttgtgctcttagcttatttttgcccaacttattctcattagcaaaattgataattttttcattaagtttatgacgtagctcttcatcacttaatttttgtaaactttcataatgatacaactttcgatcattatcatggttctgattatgagtaatgtttatttttgataataccttaccatatatggtaggtgattgaattggtgtacttaaatcagaaggaacacaggtgtcctcattttcatcattataaaaaactgaattacttttagttgtgtgtgtcatttcgctcacgttttctatgttatttgacatactttttgtatgaatatgagtaaattctgattcattagataaatttattttggatgcttttgaagaatcagattgatataaattggaatatatatccagattatgtttaacaatatctaatgagaacccacggttgcttttattcatgggggctgatactattcttttgacttgttgatttggtttactggaataattgtatatagaattttcaaagtttaaagtatcatgtatggtaaagagtaaatgttgtaatttattcattaatactttattttgatcattgttattacaatacttgaaaatatcatcttttaaaaaagttaactttgaatcaagttcatttaccaactttgtcacttcaaataattcgtcagtaacttcgttatttatgtaagtattgttgagtgtagcctcagtctccaaatttaaaaagtttttataatttataagtgaattagatattgattctagtgacattgatagaccatgtaaaatacctgtaagtgattcatactgtttcagtacactaccaatcttatcattactggtagagtaacagtagtttttatctaaaaaatttatattgaagatataatataattcagtatttctattatttttgtctttgcttgttcgttcatgaaatgatattgataacagacaacagagaaaaaatttttgtgtaatggttactcgatatgctttttcatttaaatgttgaatgtctgtgttaaggtaatacttaagatcagacaattttattccatatatttcgatatatttagataaactattttcatctgtcagcggtaatatcaattcaagctcatatcgaaatatataaaagaactgatctaggtgagatttaagtaaatttttgataaaaatggataagaaactattattattgctagtattgtgatcatgtatattggcaccacagttgtttttatcatgactgttttgtttcaaaaatgactcttgatcaaaaatattataagtttgaagtgttttataatttaataaaaatttatgtattaccatatcacaattttctaatttatttaaaaaatcttttaaaataatcatcaatttacatttaatcgttttcaaaatttgtctcttcttagaataaattatattaaatgcttttgatagtaataaaaaatattgcaatttaatatctatactaaaattccaatctttaaataatattagtattctatagtattttaaaagtaaaccatttaagtgactattagttattttttcacaatttttttcattaaaaaaatcacctaatgatagtttagtttttattattgtatgttccttaagattcggtatagactttttcatttgtacgttttggaaataagaactataatcattaaggatatgtgaacttacaatgggatacctaaacacatcattaaattgttcataatcattttgtgataataataataaattttcaatttgtctgatttgttttctaacacatctatatttaacagttcttggccttttaaccaattttgatttagagaacgatgcattcagtttatttggaaaaaagtcactggacctggaactagaattacactgtagtaggtaatctgactctttataatttttcatggtatctattgtaacagtatttttaaacagttgctttaacgtggaatgattttcattaggtatgaatatttgaagttccggtaattcaaataattgtgataccatctaacacttcttatatattgttgagctgatcttcaatcgaaaaaataacaaccacaggaaaccatacacaggatattaatttatacaattgtgtatttttttcttctgttatttttttatcttattgatagttttatctacgatgtttaaagatcttgtttttaatgaatcatctgtattgttttgttttgtttacatttttgcaaatattttcgtttttcttgactgatatattttcgcaggaatcttgagaaaacaacacgaactttttcaactattaacggcatagggataaattattttgtgcacagaaagaaggaaatatttgtgtatagaagaagagaataagccacttctgacaatgcattatttgtgaatcaatgatatattgatttaaatgttttgtgcatgtgctcctctgaactttgatttttaagttctttcgtgtatcaatcacttatgtgaaatctatatacataaatatatatatatacttcaatatatgtataaatagatgcttagtttgaaaattcatcttcatcaaactcatcttcgtcgaattcatcctcataaccatcatgctcttctgtatatctctcattagaattactagcattattaggactaccatcatgaattgaatggttatcatctaacacattgatctgagatactccagatgtaggcaatgacggttttaagatcgataattttttcatatcttgatcaattgttgtcatatcaattgatgataacaatggagaacttaagggtgacccaagacttaaatacatttgtttacctatattgttttttcgctttgaggaattgtctggtgttgtaatattatcatccgtcaactgattattaatggtagttgattttgatggactagtgtaaggaatttgaaatgtaaaggattgtcgacgattactatttgttacaacacctttatcgtatggactgttattcttaggtgatgaactggttaaaatatcgccttgttttttattggagtcactatcatcacttaaatccgataagtcattaatgtttattaatggttctctccaaaaatttacatctgtaaacttttcaccttggttactcatataaagagacttcgcttcaattgtcctatttgaatcatagttatccattgacgtatttacaggtgagcctggactagttgataatatacttctaacatcatctgaagaagtagttactggagggaaaaaatgatctactaattcatttatatgtaaataggaacttttataacctgctaattctaatagttccatatgtacttctccctccgtgttaattgtgaaaatacgtgaactgggaatcccaacagttctatatgacagtgcatctgtaattctattaccaaaccctgcaaagaatggcgttggcttttcctcattatcatcattggcagcatccatgtctatatctttatgaaaatataaggatctgatatcatttaggcatgcaattttaaacacttcaggctttttcaatataacttctcttctcagcgcagccattgtcctatcaggtgataagataacaggtcctataggtaatttatttccatcttggttaatagatctaagataacttctagtagaatcagcttgacctgcacttcgtgcagttaaatacataatattgtacccgtttctcgaaacttcactgaataatttagccacacctgcatgagtccagtccttaccgatcatagccaatacatggcctaatgcatctgatttagtaatcgtgccgtcgatatcactaataacaataggaacatcccatctccatacaaaaagtttagaagttataattgctttaccttgatctatagaatatgttaaattattttcaccatagtttaaatttaaacattttaattgatcacttgtcaatcttaatgttttgatataatttaattcatgtgtatttgaagaaatttcaccattattgtttattttggtggaatcattagtattatttgtgattgtagtcttaaaggtggtattattgtgattaattggagtgtttattctgggtatagttgagcttaacttttcttcctttttttggccattattggaagttacagagctagcagagtctgacaatattgattcattgtaatctgatgtggcatgttccgtatcgtctaccaatgatggttcactcatagatatggagttgtatgcaagatgtaatactttagtgggttgggtacttggtaatcctgaacctgtaatgtgttcataaggatttactatccgtatgcttccattactatcttctttaataaatttagtaatatctgtatcattgtccagctcttctttcaataattgttttagttgcaaatcagtatcatgcatagtattggtatttggcatataaccctccatatctagtagaatatctccattattatctactgtatttggaatatgaatctgggttaatcttctgtttaacttcgtttgaaaaatcttatttttttctagagaactatcttctttatttacttcagcagtcttactcaaagatttttcgttttgtttatcatgttctaaacttaactgttcttcaggttcattagtagaaacgggtgacattttgggactattggggacactggaaactggagagccaattaaatctgagggaatactatttacatcagaatatgtttcaaagacaaaatatgcttcaccactatcagataatttcattggaatatttgttgatttgccattcaccaaaacttctactctcttttgtgaaggtttcaatatttgaaatttgccaaatctgacatgaaatggagagcaagccaaggtaccatctggttgttccactactatgacatcgatagcaccggacaaagtggctggattaatagaggaccaagtctttgaaactgatccaatagctcttccaacgtattgcatttaaggtaatttctattttgaagtaagagtttattatattaatgtgtcaattattttttttatttcggctgtaattgaaagataaagtttctatcagcttataagcaaaatgctttaattagtataaacatataatagataaaataaaattacactttctacccactttcgaaaagtaatacaatacaataataaaatcaatttgaatagcaaaagtaaaactagaaaatatctaggaattatcttctaaaaaatatatgttcattgatgttttattcagttttaataagcttacaaaaagcatataaatggctgtgtaaaagtatatattctaatattacttgattatttcttaatttatgttaagctcttattctcacgtggcaggtttgaaatgtttaagaccggtattatttttttttctattttgtcacgcttttaaaacccaaatatttaaaggattcgtttaaaacgtgagaaaaatttgttggctacgatgaaatattgtgttattaaagtatttaataatgtaacctgttcggtttattgataatatttacataaaggtatgcctgtatatatacatacacacatatatatatatgttgactattgtcttccctcttaaccctattcaaaattgaaaaagaaataaaagagatgaaaagaatatgccagaagcgtatataagttaaagaacaagctttactaatattttgatttgaataaaaaaatctatatttggtctcaagtagaatttttactactataatattgtgttcgatttagtactttaagtgttacttgatacaatagcaacattatactagattgtacactagtccacacaaatctgggacccattccattgaaaagattccatataccttccttcatataaaccaattgtaaacttttacatattgaattagttaaaacagagggggaagttttagctctatcattgatagtagaaggttgttgtgtctgtaatcttgtcttaataacatctaatggtgttgtaattataccagcaagaccacctgcacaagcacctgtaagaatttcattggcaatagataagtcatgtttatgcgcaagttttccctctaatataaatgcccattgacgaaatttttcataaaatgcaaactgcaaagcactgaatggtaagtctcttactaatgtagctttataaccgaaatacaatgcactccaaccttcctgttttattattgtttgtattgcatctctcaaatttttgtaattgtaaccggaattaaagcttgggttgttgtatctaccttgtaattgtaaacggctcttcaatacctcagaaggaacatatactatactcgaaacaaaatcacctataaaaccagcagtcaaatgtgaaaacgaatcatttaaattccattgatcaataagtagtctttttgtgtattcataggatccaaagaaaacagctgcactgggtaaagatcccagcattgcagcagtgtatccactgtacagacctctacaaataccttcttctaaataaattgttcgatatgcttgccacatatttctatatttggtaatattaggtgcaccttgttgtcttgttttgactgtgtctaaactatgcataacagaatcaccaataacaccaccaagaccacctgctaaagagcattgccatattggattttgtttgttttcaattatcatactgttatcttcatcattattgccatcatcctcttcagatggtgatgaggtatcgcctccgaaatgttttgataaaaatgagtctgtagtattatttccatcgtgggtaaacggtattgatgatataaaactccacattgaaatatgtttatgaaagaattgataataacaacaaataataattacaagtatttaaaataaaaataagaataagaatagtagtaatggggaggaaaagggaagataatagttaatgaatataatataatgctgcaacttctttttttattttattttgtttctttggtccttttcaatgaatggaatgtgagaatatattagaggtcattaactataaacaaaattaataaaattcaatttacaatttgaatagaatcgtattttcaatgactgttctttgttttttttttttccttgaatgccacaataacaaaaaataaatatagaatttgttgaaattggaaaagacaaaagttcaaatgctttaaaaatacaatatatcctttaaaaaaaatcttgtgctcttctctttctgaacaattataactgttaataatattaatataaacttcctaaggaaaaaacaaatagtgtggtataataaaaaaggaaattaagggaatagtaaaagggaatgaattaaacgacgtatgaaatattcaaatcaaaatctcatttaacgatttctcaataaggaattaacataaaatgtagcaatagaaaaataaaaaataaatagtacaataaagagatgatatctatatacaagtagacaattagtataatttattgatgctaaaattcaaataaatagatcaataattaaaaaacaaaaaaaaaatagtcgaataaaataaaataaataactcttctgagcttggtttattgagaaagaattgtttataaaagaaatggggaatcgattatcaaaaaaataaagtgaagataaaaataaatgaaaagggcaaaaagaaatactaataagtgtccaattgacctgaggtatgtaataaaagatgcaatggatatttgattttgattttgtttatgaatctatatataactaaaagttgaaaattcgcattctcgattatttttcaattcatcttttaacataaagaaaatatttcggattttctttttttttttttgctacccaaagaagacgctccaccccttttccttcgagaagatttgagatttgaaattttactttccatcgatttttgtctgctcgaaggaaaaagcacgtggacaggatgtatggatgtgtagtgttagggtttgagtttagggtatttctaccaaacataaggtgtgtaacttatgtagtatattgatatagtatatttattaacttttcaatatggcacaatattttttttctttttttttttttatttttggaaattattgatattatttctacagcagttaaaacattcacttacttccatgcatcaaaaatgctatatatcttgataaaataagcaattacgttttaacctgcacaatcgccgtaatttgttcgtgatagtgtctgttgctaatgattaaatttggatagtggttcgaaagttaaaactgttagtagaattttaacattatataaagataccccttcctataaaccattttttttttgttttgtttttggtttcctcttttccaggtgcatttatattgactatttagtaaggatgtcagagcagcaaagaagaattaaaccattggatgtgagtgttgttaataaaattgcagctggtgagattattatatctccggtcaatgcattaaaagaattgttagaaaattctatagatgctggtgctaccatgatcgatgtattagtgaaagatggtgggattaaagtattacaaattagtgataatggttgtggtatccataaaagtgatctgcctatactttgtgaaaggttcaccacatctaagttgattcagtttgaggatttggagtctatttcgacatatggttttcgtggggaagcattggctagtatatcacacatagctaaagtgacggtaactacaaagactaaagaggataaatgtgcatggaaggtttcttttatggaaggccgtatgttatctgatccagttccaattgctggaaaggatggaaccgttattctggtagaagacctattttataacattccttctagattaagggctttacgttccccaaatgatgaatataacaaaattttagatgtgttgggcaaatattccatacattgtcaaggtattggtttcacttgtaagaaatttggtacttctactctttcattaacagttaaaccaaacctttctattagcgatagaataagatgtatatatgggaattctgttgtgtccaacttgattccattcgaagtaaaagatgatattcaggaattaaatatcaataaagtagaaggccaaattacagatttaaattatctgtcaaaaaaatccacaccaccaattttttttattaataatagattagtaacatgtgaacctttaagaagatctctacaacaagtatatcaactctatttgcccaaaggtaacaaaccttttatatatttaagcttactaattcaaccagacactgttgatgtaaatgttcacccaacaaaaaaggaagtcagatttttaaaccaagatgagataattgagaaaattagttcgcatttacagcagaaattggtaaaattagattcttctagaacatttaaaacatcaactttactcactggttcacaaaagaacggtatttcatctactccgttttctaacataccttcttcttcatcacaaagaaagactcaaagattactcgatgaatctggtgataatcatttcctgtctttgtcatcccaaaatagagcatttaatagatatgattcagctgtcgctaaagttaaaagatatgaccacaatttaatccgtacagattccaaccaatcaaaaatcacaacttttttaaaatcaaatcaatacatgaatgaagtacctccaataaataataagatatctgataaaccacaactaactcaaaattcgacagaaaacggtacggccactattgatgaaaataatcgactgagttttactgagtctgtcaccaaggtgtgtaacaatgaaagtaatgaaactatttatcatgataaatcgtacacagaaactaaaaatattgaaaacttatataaagatttggaagaaaataaaaatgatgaaattgaaattacaaaaattgaagatagtagtagaataaactcatcttttgctatggacgtaaacaatgatcaaaaaagtaaatatacaatttcaccaaaaaaaagagtagatgtgaatttaactagtatcaaggagttacgtgaagctgtagatgattcaacacatagggaattaactacagtatttgccaatctttcatatattggattggttgatgaggaaagaagaatagcggctattcaacatgatttgaaattgtttctagtagattacggctcagtctcacatgaactgttttatcaaatcggattaacagatttttcaaattttggtaaaatcaatttagattcaaagtacaagagtgatttggttttaatgaacattttaaatgtattcaatgatgttgaaccaaccgttaaagaaaacattatattaaagctttgggaaatgagagaaatgatggatgaatatttctctatatcaattacatgtgacaacagcgaatattctcctgatgctgtgaggattaactctttaccactgctattaaagggctataatccaccattgggtaagcttccatatcttatatatcggttaggaactaaggttaattggcaggaagaaaaaccgtgttttaacgatattatacaccaaattgctttattttatattccagaaataataccaaagagtagtacactaaaggaaactggaattatggccacgaacaaggagattcaaaatgagcaagatattgaactagttaaacgtaaagaagagatggtgtctactttagaacacgtgttattcccatgcataaaaagaagattattagctcctagaaaattacttaaagatgttgtagaaattgctaatctgccaggcctatataaagtctttgagaggtgttaattaattcataagattttttatcagctattttacttttttaaaataccatttatatggtacatataataagatcccttgatagaaaaaaacttctaataattgatatcttacatttttgtttctcaaatcgttttttttttcagttaaatttgtatgaggtgttattcaatagcgaatttcaaaatgaataaaaacaattctatcctctaatccatatgatatttttatttcattttttatttttctctctgaaatatctaagtgatcaattaaatctagtaacaaataatcttgaattgtcagtacaaaaagaaaaaaatatttacttatctttttttggaggatcgaaaatattgcatgatcacatctataattatactagtttgatataatgttacatactttacttatgtaatattaattgataacttcaagtatattatgctcttgttggaatgcttgaataatggttttaaactcttcgtaaacagcaaattcatctgcctcatcttcctcactattagaaaatactgaatcaaattccttattacttaataacaaacgttcgccaatctcagtcacacttttaattagtaaaggtttcttatatgtaaatctactaattagtctaatatcatcttgaaaaatcttgaaaataggatgaattatacctttttttgattcaataatttgaactttatcccataaaatacctaaactttccagtctactaataattatgcccagtctattaatggaatcaccaaatatgatgggaagaacagttattaattctttcatatcgtctgctaattgaatcatatctggtctaggttcaaaaatattatagaatattaagaagccaattatcctagagacaatattcaacacataaggaaacttattgaaaaggaaaaatcctctattgatattgtcaactaactgataaataattgatcgggtataaaatatgaacatatctaatgaactagatgtttgataatatattaaatatagcctttccattttccacctgactgatgtttccaaaaatttcaaaataaattcttcaaaaagagaattagtggtcttttcctttgttttagttagtttcttaatagaattatttagtttttcgagttctctctttgcagcatcaattgtttttaaaagtggtctttgtgtagaatcagatgtcttttctatatccctgtcaatagaacaaattttccaacatactaattcaaaagtgtcattattttgataaatgttcatccctaacgctgcgtaagatgaagctgattgaaaaagagacggtatttctgaatgacattcaatgcattttaatggggaactttggaaataatctataaaacacaacctgtaccacattttactgaaaacttgttttgataatcccattgcagtgtcatctgtaatatattgtttaaatgtggtaagattaaacattttaaaaagttgaatactttgaataaccaaattattagttaaagagggtaaattcaatgatatagtagtgttatataggatcaaaaaaatttggatcaatttgacatttggaaacatcatatagtttgttctcttcaaaagaactaaacaacatttcaaaaagccttcatatacagttagttgtagagtttcagaccatttatcttggatatcaatctctaaccagttaaagattggttttggatctaaaatttcgtttaattggtctattgatgcataatacagacttaatgtaaatattgcccatagaagtgcatcccagtagtaatcctcaggtgtagatgatcccttcccattttcttgctcatggtgacgttttcttctccaatattgttccaattggataaataaatcgttaatatcaccgactgaagaaaaaaataaagttcctaaattttcaattgcaaagtttaataggtcaaagctattcttttcctgtaaataatttatccaaaactcactaacattcaattcttgttctaaactcattattgtactagatgatgacatatttctagttttcattagtccaatattaataatccagtattcataactttgccatataggcattatattggtaatatcgtctttatttcttattattgtactttgagatagtatttccaaacttgattcaatacattccctttcgaggccctttcttatacatgtcccacatggaattaatctatcacatttcactttttttactgtacaaaaatggcacgctagtttagttctttccatttcaaaatattaataaagaaatcctaatgttgtaacctgagaacttgattagctatatcaattaattaatttctgttgtatagttaaatatagaaaagttcatttggatgttctaaacgtcattatcttgactgaatattgcagtagattatcataaacatatttaataagaaattgttgaaaaatggctcacgtttcttctatatttttatttaattgtttttttttgtttgttgaagtttttcaaatctcaaaattccttgtgaaattttcagacaaagttaagttattcttagtattagaaatccaaaagaaaattcctatttagtagtaaataaacattaaactgctattatacgctgtactagctagtctctccgtgtcaatacgaatgtttgttccgttgaacgagtctaagtcatgaatacagaatacaagaagaaaattattttgagaaaacaacactcttacaaaataattcacaataactgttagattatgtagaattctaaatatcttaatcaaattgatttttttaggaatatgtataccaaatatgttattcaaattaactcaagttttaactgtcattgcaatgtaaaattaatgcatcatttactatgatatatgaggatatcttatgaattttgaatttttattttaaattgcaacttatttactttatggtacaatattattttttttaatctgattttctgttgcggtaataactattttatcttaaatttatattctagtataaattaaactaataggtatacattttttatataaatactattttaactattctttccaactattgcttctttttattttgtaataattttttttacattccatctgaaaatagagataattcagtggattggaacatgaactgttttagtttgaagaaaagacttaacaccagcttctcctaactcacgaccaattccactcattttgtacccaccaaatggtacagaaatttcttcgtcattggaagagtttatccatacggttccagtctttacatcctttataaacttatttattgtattgatgttgttagaaaataccatggcagctaaaccatattcactgttgtttgtaagtttaatgacttcctcatatgatgtaaatttgtagacacaaacaacaggtccaaaaatttcttgttgcattaaatcagaggtctgttctatatctattacaatcgttggagggataaaatagcctttttcgacattgattgggtcagtaattatttgaactttctttgatttcttatttaaaaagttattgattttatcatattgtattcttgagattacaggacccattgtgcaatgtttatcaaataaatcaaaattgctcccaaatttataggtttttcttgtaaaacacttgaataggtcaataaacttttcatatatggattcatgaacgtaaattcttgagtttgcagtgcaattttgccctgaattatgaaatattccctttgtgactgattctagaacaatatcaaggtcactatcctcaaagatgactgctgcagatttcccaccacattccaatgtcacatcttttaaatttgattttccagaatattccataattaatcttccaactcttgtactcccagtaaaagaaattttgtctacatccatatgattagctagtgctattcctaccttatgaccttctccagggataatattgattactccgggtggaaatccggcttctttgaaaagttgacctgcatataggatggataaagaggttaattctgacggcttaattataacggtatttccagcagctagagcaccttgtattttccaacatgccattgcaaagggataattccatggaataattaaagcaacaacaccataaggttcttctctggtatagcagtatttgtttttactaattggaacagtactacctactgtaaacttgtctgaagcaccactataaaaatgagtcaattctataacttgatctatatcacccaaagcattggaatggtatggtttaccagcatctaaacaatctaaaatagccaattggactctatctctttttattaaactagcaagatttctaagaagattatttctttctgtaggtgaagtttgactccaaatatgattaaaacaggttcttgaacttattacggctctatcaacatcatttttgtttccaacataaaaagaggtgatgatttcttctgttgaagggttgatagaattatacttgttaccattagatgagggaacaaaatcattatcaagaaacaaaccgataggttggtggatatcaggcaagctagaatgagtttggatcgttgtataaagattggtcatcattctctctgtgcttctccctttttttatcttagcatttttttttctatcaaataataaactgtactattatactagcatcaatcacttcataaatgacaaggaaaataaaaaatgataactatacagagactttagtattttatgcattatatatatatacatgtatatgaatcaataaacaaatttattataaccaacaatagcctaaccctttttacacatccctagtcctcttttgtccttttttttgactcccaattactgaatttataagttggaaatactataaatctcattaattcacatttttctgtacaatctaacaatggaactcattttttaacaaaaaatgtatatttgatgaagagggggggtgttgtaggtaagagtttgtcagttagtatatcacttacacaactaaagtccctaaccagtctatagctttatctctatcaatttgatagacataccgtaatggaaaatcacaactaatatgaaatttataatttatatggtattcccacacacacatatatatatatttatatctatgtttatgtttatataaccatgtatataaataaaaatacccgataaaatccctatcgagatatatgttcaattagttttgttcaatttccatcatacgttgaggctcgattgaagtggcataatcattattgtttctgtcctgttcatcctcatcatcatcctctacataattattttctatttcatctagttcacttgcatgagtatcaccaagatcttgttctatcattccatcatactcataatctaaatcttgaagacaactggtttccgtataattccctttatgttggtttaagcttgaataatggttcattccagtacttgaaataagtttacgtatcagcgtacgcatcggtgattctcttattatagcaccattagattccttgttgacaacaattttatttaatgatgaatcatatattggtggatcagatggcaggtaacccatggatatttcttcgttaatactatgtggagatgtactgtattcaaatccaggaggtggaggcagtaattttccagttgcatctcttaactccccattgtgatatttatcggtgtgtatcctttcatgtgcatcgtttagtaaataaatatcttcattatcatcgtcttctcctgcactttctattaaagtatcttgcttatattcctcataagatggtggtggcagtttcattccagtgattcttgcatacccccattttttcacattcgcttcaatatatacaaatccaaaggttccaaaattggcatggattctacatgggatattcgcaccgatgcacggataaaggtatttgaatttccaaccacgaatatgaccgccacaatccttttcattaacttttttaccatttctagtgaaaaatatcgtaccactccttgttctataaccaacaccgataacatcacctctctcacacttaggaaaaatcgatattagagattcatctaatgggaaagatgtatttactctacgatcaccattcgagtcatatgctatagaattgtgatgtctaccaggcaatctaaaataagggtagggagatgaggctaaaccaaatgatattaatccctccacttgtttatcctctaattcatccatggtatctccactgtttgattgctggttattccattcaaatattttaaattcacaataataaactttgttaatacatgggattggtaatgtagtcatgattgatgcatcataattattatttaaaaagataacttcagttttattttctaccaaaatagtatcatttggtaaatttggatcaggacgaaactcccatgcggctgcaccttcatcttcaatgtactgtattgtttgttcattaataactggatcaaagacattatcatttctatcagatgaaccgtcgtttctttctctatcatgatcattcggatcgtcaatgttacttcttaaatcataagtattattattagctattaataaagggggattctctctaagatattcttctccctggtgataatagaattgttcttctggtgacaataataccaatttagaaaccacttttccaggatcatctaaataaacagaccatttataagctttcttattttttttatatatcctagaatcactagtcgttgtacttgtcatattcatctgcgtgaaacatggatcgtaattctctgtctctgtaatgtctgtatcattcagcaaatcgccctgactctgttgttccatatcgttttcgtacaaagacaaacgataattatttctatatattgataagacattcgctatagttctaataacccagaggagaagatttgcaataaaaataattagtataatagatccaataaagaataatattgaatatacattagggctttcattttcgtactgtggttgttcaatcttatcaaagggtagtccaggataaactaaatcattatccttgattatcgagcccgattttgtgtccttattattttgtgccggttcattgtattgtattatatcaaccatagttccatccacatatacttccacttcttggttagtaggagacggtaaagcattgatattttttggaaaaattaataatactgtagaaattatcaaaagcctattattcctttgaaacattttttatttcttttttgattcaacagttattttatattattttctatttaaagcttttatcttttatatattgaatctggtcaagttttatgtttagaaagaatattaatgtggataagaatatggaaagaaaaaataggtatcgatatctaaataaaattggtattattagtactaatagaaatagaaatgacgaaaaaatatgaaggtacagtaatttgtgtatagtaatatattaacctttaacttattataagtttctcctctatctataaaaatataaaaatataataaaagtacacaaacgcaaacacaaaaatgaagataaaaaataaaatttaaaatgtaaagcaataccaaataaacaaataactaaaagtttggtttggatcgttgtagatcttatattttttactaattattaagtttcgatatatattgtgatcgactgatctcagcttcgttattgtgacgaaataaatataaaacgaatcgcaagtcaggattatgttaccacactcaattaaagcttttctttcttctttctatctttaatatccgttgtttttttttagctgttaaaagaaaaaaaacaaaagtttcaaatagtttttttttcaaaattctgagactgaggtaattcgaaccacggcccctatcgtatttgatttgtaggagtgagtgcctccctcttcaaaatatattagcttcaattcacatagagagattataacattaattgctagctgtctaatagtgttgaaactttctaataagtctattggttgtctaattttatgcaattcgttaggctatgtattcatgcattcatatatatgtatatatatatatatatatataataatttcggtaatattacgataaatcaaatctagctcctgcattaattgcgtataataacttttgtttcagaactgttttatctccgtaatctggtagttttaaaagattcacacacgtggatgcagtaggtaatctgtctaattcatatttacctccattgcgtatcccaaatttaggttctaaagcagagaatccctttaatggtgcttgaggcactgatgtcacaaatcgtaaaaaatctcttctctctttgtcattaaattcttctaaaacttcccagaaatatttaatggttgaatcattttcatcgtatccaccatattcagtatgagttcttagatcctcaatatcaacaggcttatgaccacctgatatcaacatttgaaaatctacagtgttaaacataccaaaccaatgttgaggaatgatgctacctaatccttctaagaatttataactggctggctttgcaattgaaactaacttataatgggctaatttccaaacatactgtaaaacattctgtttattaactttcatttcagaaccattaggaatcaattctactattttttctggataaaacatgttcatggtttcaaaagttaaatctaattcagttagttcttcatcagacatatccagtaatgaaattaaattatcatatagtgtacgatccaaactacgtaaatcatcaatggttaagtgatcaactccgattaataacaacttcaagaaaaaatttgcaaattttaaatccaccaaaatgtgatcatataaacatttcccaactattttccctaaaaacaaaataattttcaatgactcttgatcagtgatagctttaggatatatttcgtgtaattcgtttgtattaaaaagtttatatttagaatcatccttgaatccctcctcaatcacggaggttaaaaattcctttgttacacctccaccatcgataccttcttctctaccaaattgattaacaaaagttacagataacttcgattttaaatcggaaccataattatatgcatccatagcatcttccaacacatgttctctagatatagtagctgatctgcttccaccatgcataggaagtcttgcagcatcttgcaatatttcattggttaataaattcattacattatcataacccattgcatgtttatcagtttcaatcaaaaaataaaaataatccacacgttgattaaatgggataaaaaatggactttttattaaaatattcaactttctaaatggtctggacataattccatggtatttctctttcaataatttctctaacacaacatttctcttttcatagatatctgaactaatacctatattcatttcctgttgaaataactcttcatactgaattaatattggatatatattagtatcaataaatgactcatcagtagcacaccaaaagcttttatttgttcttgaaaagaaatatcctcttgagtccctaagatataattgagttaacaaagataaatcatcttttatatcaaataatatattatcaattgtttgtgtggtagttttacctatcgacactatttcattggaccttgaattccagagagtgttaaaagtaacttcttttaatattttggttaataatgttaccaaaggcaatgacaaatatgagcgcgttgaattagaaagtaaatctgcatctgtagcgaattgtaaatataaccttgtcaaatcttttgtaattctatatgcaggtggcatcgatgtaatattgctcttattgtgtagatttaacttcataaggctttcatatagaagcatattaagagattgtttagctaataagatcattaaaatattatttctattctcagagtatttgctaatttgtaaaagattgtcaataattgtgagtggtaaatccggagcattgtcttgtagagaagtacatgataatattttttctataaaacttttttctagagttagtgatgaatattttaaaaagcaaaaagtcgctttgtctaaatggttaataatgtcaaataccatgaagtagaattcatcagacactttggatttcatagtgactaagatatagcacatattgtttagaagaaaactgccattgtgaaaattttgaaaattttttggaaatagtttatatttgacaattgaacaaaataaattataatcaggttgaatactttctaaaaaatttattagccaaggatctgaagcagatattttttgtaatgataaaaattggcagagagcttctgcactatttgatgaaagagctcctttatttgcaacattttttagaaaaggaatcaccccattgttaataaataaatccatattcagaatttctaatcgtaaattaataccccttaatatatttattaagcatgattcagtctgtaaatggcctaatatatcaatcaaagcattattgctataaggtttttcatataattggcaagagttttgtatattgagcaaagcattattaagatctgactcagacatcccaaaagcaaataattttgacttaaaaagtataatcaatgctagttgttgtcttgtatttaaattggcacatgttgggctatataaaaatctttttagatctaatctttttcttatgaatttctggatggttctgattgcttcttctttctctctattttcagctcttctttttctttcttgttctgctctttgcaaaatatcctttttcgtagtggacctatttttagttcctaaattaatgactcttcttcttgtttgaccaccaaaattcagcattgtaattaaatgctatgatgtactggaaatatgtataatgtatacaagggaactgttttaattactattaaatactttagattactctattccaagttatcaaataagtgaagctagttaatactcgctaacatataattagtgatagtttttgaattatttgtaatatttcctattttaaatatgaacatttcaggagcctggtagtcattacgtaatatctaattcactcaaaatcaattttttttttagtagacaatatttttcactctttaatttttctaatcttttttatttttctaataaaaaaaattcgaaatctaatattattgatactgagacgttgtgtcaataggcattacaatggaatctgagaatccatgaagtcaaaaactatataattaaagagttcaaaacaaaatgctggcgatagatattgtagtgtatcttctttataattgttcctgcatatcttaatcgttaatttagatattttgaataaaatacttatagattatgtaagttcatatatattacatgaaaggatgaaatatgctaataatcaaatgacagaattcgactttttacgaatatatttgttttatctaaaataatgcatcaggtaacaaaactacaaaaaaaaaaaaaaagaaaaagaaaaaaaaatattggtaactttttataagaatagaatcattatgctgaagattttttcttttttgtagcttcagccactaattcttcgaaaacttgagcttcttcttgttctgccttagttctgtatgctctttggaagactttacctagtatttttaatgcttcagctcttcttattctagtatttaaatcaacagtttgatcttcaagaacctttttacacgcacctctcaagtttgacataatttcgaatttagaaccatgccatgctgcagataatactttacccattaataactgttcttgtcgagccatttctgcttcagttggtttttcaatttctataccatttttgtcaaatataggttcgttcttctcggtggcatctttcatcttctctaattcttgcattgtgtgttgtgcatcaagagcagcagatacagttcttaaggtatccatgactacaccacccttagctttcatagaatggaaaattcctccccatccaaaaaagttttgtgatcctagaaatattcttgcttgttcacaatatacgtcgccaattgtatgtaatatatcaagaccaaatgattccatcttcaatagatttgcctcctcttcaaattttttttcaaacgataatttacagtcatcgtcataggaactttcggttaggatagaaagtctatcaattaaaatcttgcttaaagcttcgatttgtttttccttttcaatagcttgttcttcttcaaattgttctaatttagtctttttttttttcttctccttgtcagtgtcttgatccgtattgttgctttcatggatggttaaatgtttaatatcaccatctaattttgtttgattatgtgactcattagactgttgttgttctcgcttctttttttcttcttcctctttttctttttctctttgtttttcagcttcatcctcatttgacaattcttcactcttttgtaaattttttagtaattgtaactcaccgatgtatgacgcaaaagcatcaccgccaaagataacattgaattgttcagcagcatcttcaaatccaccctttggaatggcttctttcttcccaaacttatcatatttagcacgaagagtctcatcactcaacacttgatacgcctcagatatagcttggaatctttttgtagctgttggatcatcaggattcttatcaggatgttcttgaatagatttttttctgtatgccttcttaatctccgctgcagtagctgttggttggatgcccaaaagatcgtaatacgcagtgtcaacgaccatattcgtctaacttcgaaaatataatcaagatgataataattctgtggtctatttattcgtctgtttttaacacacagtgtgtgaatcccataaaaaagcgcctggtatctaaatatataatttataaaggttgaagtaattgctaaagcagcactccaaagcacaaaataggatactagacagaggttagacagttatggatcgtcaaattttatgtattggaatgaatgctgtatacaattgagattaagcatatgttttttgttaggaaaaaaaaaagcctgaagtaaaagatgaactgtcttttttcttttttttttctttatttccagctttattgaaagaagcaagaaaagaaaataaagatattcttcaaaaaactatttagggttataaagcttttgccctaaattggggagtttatttattagggtttaaggtaatttctctaacttttacttcagaactactgaaagatgaagggctcgacacgaaacaacgaaaataatacaatttttaacaacgattccatgtatggaacagaattagtgaatttatgatgcataaacataacaagatatatatatatatatgtatgtatatataggtacatgtacgtatatgttttctcaatgaaagctgtcgagagaaggaaacattttcaggaacttaaatgtggttgtttggaatactgtttctatggagactcttaaacagtcttatttctaggacgtatttccaagcagatgagttttggcaaacattagaacctgcacattggaaagcgtttggttatggaacaattacatgggaatggaaagagggattccgaagttatgcattcccctttttatttgaaattgtgtatcgctctatatttttatggaaatcattatataaatttatagggttaaatatggattgttggaatgctatagaatataaagcagtcttatatctacccaagattttaatggcccttattgcagcaattggtgaatattatatgtgcctctttataacaaactttttatgtcatataaattacgaaaaaaaatcttttgcaaaggatcaaacatacaaagagaaagtgactaaaactgttttaattttaacaatgacaaatttctttaatggattttttatcactcgaacatttataaattcatttgaaatgacattaacttccatctccctatattattggaaatggaataacattggtttagagcaattctcctttcaaatgtctttatttttagctttattcacgtgtttacagagaccaagtaatggtattatatggattattcttggttgtagtttactttataatcttttaagagataaacaatattcaattgttacgcaactattatactatgtcatgagaaattttattattgctttaatctttaactgtattattgattatcatttttaccataagttggtattcccaatatttaaatttattgaatttaattttacaacaccattatcacagttctatggcgttgcaccttggcatttccatatattgcaaagttgtcctatccttttaggttacaatatcccatttttcattattggattttttgtttcaaacaattgtcaaaaagagtcatcattttataaattatccccacatttcactatgaagttggctcttatagttaatttaataatatattcatgtctacctcataaggagttccgttttgtatttcaaattcaacctttctttttgttatatgcaactttaggggtcttaagaacaattaatcatattccaaggtggattatttattctgtaccattaatttcaacaattggatttatcatagtcgattattgccatgaggctggatctattgaggtcataaaatatctacataatttagatgaaattgaaagtcttggatttgttatgccatgtcattcaaccccaggtcattcatatcttcatagggacgatatcaaagatctgtggtcgatatcttgtgaaccacctctaacccttttaaatgcaacagatgtttcgattaggttatcaaagtatatggatgaaagtgatcatttttataatgatattccaaatttttttaataagtatttttcagatacgaagaataataataactcagttaaatctaaagaattcgatagaatatggcctcaatatttagtagtatttgaacatttaaatagagaatttttgagcttatattttcaagagaatggaacgtacaaagaatataaacgatttttcaatacattatctcattgggattctagaaggttaggagatattattatttacaaaaaaatagatatattataatacaaatggagtcttatatattctgtttctctttcttatgaattgttcattatatatcgagtgatttctatgtaagtaaccatatctttttattataacgactctatacatattttctaatttttggatatctcttatttcttttaattctgtatgtggtttaagtctcttaaaataaaatatatttattcccttctcttgtaaataaaactagaaagagaagtaaatctggttcaatccaatataaatgtatttaaataaaaggataaaatagaacagaaataaagtagaagtacgattcagaacatatcgatggattattaatgttaatgtatcacccaactgtaattactcgtctgcttcctgtaatttttaggaatggttataaaagatctgataatattataggattagaaaagttcccgctgggaaggtttacgttaagagaggaaacttactctactgtagctgatattaataatggtggtaacattagtgatagaattaggatactaccaaaaagtttgatttccactgcaaacaaatatgtagagaaattgttggaactagaagactcattatcaaaggggcaagaatttagtgtagaatctcaacaagaattctctaaactttctttaattaatggggtgtttgaaaattataaatctatgcttaatgatgtagaagaattgcagaatttgattgagacagatattactttgaaagaggaagccactgaagaactggataaaatgataccgaaatttaacgattgttccaataaattattggaacatctgattccatcacatccttttgctgaaaagccgtgtttactcgaattgcacccaggggtgggtggtattgaagcaatgaatttcacgcaagatttatttaatatgtatatgggatatattaataaaaagaaatggaagtcccatgtaatatcaaaacaaaaaaatgaaagtggatcaggtttagttagtgccattcttagtgttgacgaattgggatcttatgataaattaagatatgaagctggagtacacagagtacaaaggatacctgatacagagacaaagggtagaacccatacgtctacagctgcagttattgttttaccacaaatgggggatgaatccgataaagtaatagatgcatatgaaagaactttcaaacctgatgaaattagaattgatgtaaaacgagcaagtggtaaaggagggcagcacgtcaacacaactgattcggcagtaagattaacacatattccaactggaattgttgtgtctatacaagatgaaaggtcacaattaaaaaacaaagcaaaagcatttacaattctcagagcgagattggcagaaagagagagaaaggagaaggaggagaaagaaagagcagcaaggaaggaacaggtgacaaccacagataggtcagataaaattagaacatacaattatccacagaatcgagtcactgatcatcgttgcggtttcacagttcatgatataggtggagtagtatctggtgaaaaactacaagaaattatcgatgcagtaaacaaatttgagatacaacagaaatcaaaagctcttttagaatgataggtggggaggctcgtccttacaaatatctaccttattgatccattatctttcttctctttttctcccatcctatctatcacatatcctatctgtatataagcaaatgaatataggtgtatatagagataggtatgcatgtaaatatattattctcaatattatacttgactactgcttgtggaatgattatctccttccttttctttaaatttctagcaaagggcactaacaaaaattagcaatatttgcaaagaaacaaaaaagtgataaagacattctactaaaaaaattgttaaatattacgatggcagttatacatagcatgttcgcaaactttgaacaactcataaagttacatatgatgtctctgcacgcatcaatctcttatttaaatattctattacctggatattgaagtctatgtatttcttcaagtattaatagatggtaatgaactccaagaaatgactgcaagagatcagaatgtatggtttcattatagatcatcattaaagattggcgaactagagagattcataattaaatatgatttgtatgaaggtgctgtaattcctgaggatttaacattggattccttatggttaaggatcaaaaacattgaacaactttcgtatagagcaggttatcttatgggtccgtattttatatatacagatttaaggacagaaaattatcatcattcacaaaggattatctattcagctgatcagccaaaatttgaacctaatttacaacctcaacaacagagtatagtggaattacctgttcatagaattcagaagcggtatgtttggattgtagatgttataagtcaaattcttttttctacaaccacaaaagttacctttgagttgtccattggtacaactagaggttcaattgattctaaaaatattgattttcttccaagtctggctacatattcagataaactacaagtaactagattaacaacattagatatatggaaattgtcttcacaattgtccttgaaatgcgacagagataaacctaaacatttgattattttaacacatggattgcattcaaatgtgaccactgatatggtttatatacaagaacaaatttacaatcaacaaaaaaattacccaaatgagaatttagtggtagaggggtttcctgataacgtttgccaaacagagaagggtataaaatatcttggaacaagagttgccgagtatattgtatccaatttatatgataaaagtataaaaaaaatatcttttattggtcattccctcggtggtcttgtccagacttttgcaatagcgtatattgctgttaaatatccatggttctttgagaatgtggaaccagtaaattttattgctatggcatctcctttgttgggtattgtaacggacaatccagcctatataaagatgctactttcatttggtgttattggtaagacaggacaagatttaggattagataaatgtcccaaagatgataatgcactattatatttattgtctggggaacctgtcagagctattttatcaaaatttaaaaggagaactctgtatgctaatgtggtgaatgatggtatcgtacctttgtatacagcgtcattactatttttagattatgatgagatcttaaattcattaaatgaaaaatgtgtggataagacagttgatagtgaaaatatcactatttcagataatacaagatttttccaaaaaaattttattaatccgttaaataaaattatgggtgtttgggcaccacaaatgtcttctgatggaaaaaggaataaggattctaaactacctaaagtttcaatattagaatctgcgacatcaattttacttccacccctaccagataaagcatatatcatggatccaaattctcgtgaattatgtattattcatgataaaatttatacagaagatgatattccaccagtaaaagacatagaagaaagtatatataatagtagtaatatcttattacaaccattcacaattgataaaagacaaaaagaaaaatatcagaaattagaagagacaattgcaaggcgatggcataaaggtctttcatggagaaaagtgattgttaagttgaaaccggatgctcataataatattgttacaagaagaagatttgttaacgcatatgggtggccggttattgatcacatgattgataatcattttaaaggagatatttctgaaaatagtataaagtttgatagttatatggaagattatagaaagattaaagatgaagacattcctatgaaatatcaatggatagtcagaaaggaggaggaaagtatttttgatgttggtcctactggaatgatttcaacaatggccgaaatgttagataatttcacccaaaaacaattgataaaaaaaaccaatatgcatactgatttaaaagaagaaataaaaaaatatgaagagatgaataacactttgttacattgacaaatgttgaaagacagtatataaggaagtaactgcataaaagcgtcaatgaagcagttaaaatatatttatatatgtctgtatttataactggatagatagattaatatgtttatacatatgtatgtaaggaatggctattagtactcaggatgtctctttcatataatattaccgtatgcaattctaaataatgcatcttggatatcactgtctgttagttgcatgatatgaagcctttttctaagttgattaaaatcaccttttttaatgtacgaagagttagtgaattcaacatattcatcattatactttagatcaataatggacattatttcagaaaaaaagacctcttgtttgttttggaaatcacataaaagatttaaagtctctttaacagatctgaaatctatttttaattggtagagccccattctgttaaatttatttaattttagtattgattcaataaaataatttatcataatatttaatagttcattcttaatattgaataaaatagcaggagggatatctgaattttccaattttgttataatttgtcttaacatattcactgtgtttgttatttcaggtcttatagcctcctcagttaattcattcaatgtccatatgccaattttgaagtaagtttgtaacgaatctttcaacaatttttgggttctgtgaataacagcttttggtaaatccattaacatattctctctataatttgataaaatatcctgaaatacggagatgtattcctttgattctgtttcgtttatagtttgagtcagtttaatgaatatactttgattggataactcattcaattgattgtaaacaatattgaataattccaatttactgatagtttggtacaattcttcttcttttgaatatttatcaggcaatgaattagtagttaaaatatagtccatatatctggaagataaatctaaatatatttctgaacatgttttcaatttatattttaaaagcggttcaaaatccagctcataaaaaggtttaaaataatcgtatactttatctaaaagtttaataaaattgtatcctgatttgatcaaatcctttgggttctcggtgattacatgatattgattaattatagttttaatttcataatttatccaaatatcccaaaatttatctgagataagggatactaaaccattaccatgataatggaaagttttgattaaatttttatcagtgtaaataatttgagagattaatgtgattagtgagtttaaattattatttgataaagtattattaattctatctctcataggttgtaatatatgattgataaattctttgtgtaataattcttttgtcaaaccaacatcattgtcttgaaaaagagtgatgcatttattaagattagcatttaagtaatcatttaaaaatctgaaataaacagcaatatcttttgagttagaattatggaaatgataggtgaatctgatttggaaatttgttgctaaagatttaaaagtccagaattgtcgattttctttttgcaagtataataaatccagtttataaagatttgaagatctggagcgtaaattatttaaagaagtgttatcagacaataaaaacttgtttgtatcccatttagagttgagtaacagttggttcaaacattcatattgtctttcgcaaaacggactcaagagtaattgatcaaatttattaaaaatagcttttatcacaggttcattttctgtaatatgtccctcagataatatgttctttatattgttatggataccagataagttttcgtaagatgtctttcctaagtcagaagcaataatttcatcgatatcattttccacttgttttaattctttgatatttgattcataagctaacttttctatcaatttgctttcaattatatctaatatttgtaattccccatacttttgtttaaggtgatcgacatcagatagttgatgaatattttcaatcagatcatctgcgatagatttaaagtttggagtttgttttgaaagtatttgtataagtttctcattgtttgttaatttgctagataattgctttcgttgattgttaattgattcaatattcttgtcaatatcaaatatgtcttgaatatcattcattataaccataaataagtatagatatttatacttgtatgtagaaaaccagtaataagagagatgggtgaaccggttgcacactcaaaaagcgatcttatctagtaaaagtatccacgaataaattttaattatatatatatgatgacttaaactaaactgtcaacctttctctaagtaatataatgatatctttcctattagtggtactagtattattagtatctatttcttttcttcttatacactttttgttattatcataacaaaaattgaaggaggcatactacggaaatgtgcggaatttacgttaaaatttacgttaaaatttacgctggaatttttaagtattttgtggagcctcattatttccgagcggaacgaaaaacgatgatagggatggaaaagtagggcggggttcaaatggccaaggttaccttttctctgtgtctttctttctttctctgaagataacacttgaaaattcaacattattctaattagtagctgtattgagtttcattatagcatgtaaataacattgttgatgcaatgttatgattgctgttttctaaaaataataataataataaaatcaataatataattaatgttaatagtcgaaaaatcttgacacatttagtgaaattttggtaaatgcatactagttttattttgtcattgtgaagaatggtcaactgtaataaaattcaaaaaataaaggcaaaaatgaaaatgaaaatttaacatttataaggaaatgtgcctaacatgctactaaacttggtgatagtgagtatatggtagagcgattgatgttgtatcattaataaaattctttgatatttttttcttatatttagaacatttataatcacgaaatgcaattgtttaatatgttcagaaagggactgaaaaattttgtttccttaacttcttttccttaacctgatctatagttttacacttcaggacaaataaactattctcattaatctctttattcgtattttttgcttcagcttaagtagtaatttaattgttagatgttgtctgaggatatagaatatataattgggttactttattcatatatttataatctgggtaaagaagtagtataatattattttatatgttttatatattttttatattttttacttgcattttattttttctttcttcataagatgtttatttttcggaggtgggacaatcaaggatctatattgttgataatagtttttacaacaattcataataattgttattcaagctttcaaagttatacaaaacaatcaatgttgactatgctataaaataattttgaaatctactaatctaggtgttgcagttttttatactgaaaataaataaataaataaataaataataaatcttgcaagtatgttacaaagagataagtaaataatattagaattttcaagatgcaaagagtacatatataaaaaattgtaagataaaattatcaaataactgaaattcatctcaacataaagggttttattgtgctttagccagttttcatagaaactataatagaaagaaaactaaacaaaaagaaaaaaaaattgtaaaaacctttaataatgctattagatattcactaatattttatcttctataaacaaagagtagtatatctctctctagagtcttgaatattctattatgaatcatattagtaactattattaaactatattatgatagaattcatacctcccttttactcatagtcttctttccagggaggataaccaaattgaaaaaaaatgcttaaaaaaaaatagagcattatgatatcttcacctaagttgaaaaaaactaagtatgtttatttatctatagattttcttttcatgataaaagttctataattatttattgttttctattttataattatgagttgaaaatatctgtctatattaaagatggttactgtccatataaaaaaagaacgaaaaagtgatgttttcaataaaaaattttaaactaacaactattataacatttaaacagttaaatatgtaaatacttatttataacttatataatttacatccatcaaatataaacacttctattttatatatatatatatatatattatttttttttttttaaatcataagagttttctttaaaaaaaaaaaaaaaacaaacaaaccactattttgatattattatataactatatatatacatacacacacccatatatatatatatatatatatatattaattttttaaaatatgaaattagaaaattagatgatcatatcttagaaatcagcatcgaaattgaaagcacctgcttcagtcttttcagcagcagccataacaccagccttttggtaatcagagactctcttttcgaagaaattagttttaccagccaaggagatgttttccatgaaatcgaatgggttttcaacattatagaatttcttgttaccgaaggcgactaataatctatcagcgacgaattcaacatattggttcattaagtctgcattcatacctaataaagcgacaggtaaagcatcgataaagtatctcttttcgatttccacagcttgagtaatgattttttcgacaacttctggatctggcttatgtttcaaatgggcgaataatagacaagcaaaatcagtgtgtaaaccttcatctctacaaatcaattcattggagaaagtcaaacctggcattaaacctctctttttcaaccagaaaattgaagcgaaagaacctgaaaagaagacaccctcaatagcggcgaaagcaaccaatctttcagcaaatggtgcttcttcattttggatccatcttagagcccattcggccttttctttaatttgtggaatagtttcaatagcattgaacaaaaattcagattcctttggatctttaatgtaggtgtcaatcaaaagagagtaagtttcggaatggatattttcgatcataatttgaaagccgtagaaagctttagcttctgggatagctacttcagcagagaagttttcaactagattttcgttaacaataccgtcagaggcagcgaaaaatgctaaaacacgagagatgaagaacttttcgtttggattcattctgttgttccagtcatgaagatccttacctaaatcgatttcttcagcggtccagaaggaagcttcagctcttttgtaggcttgccagatttcgttatatttaattggaaagacggtatgacggtttttgtcaccaaccaagattggttcttccttttcagtttcttttaaagcatgacgttggattctgtgagagtgtaagtattttttgtgttctctagctgcttcactcaatctgtcatgaacagcttggacttcagcatcattagcaggtctagaaatagcagtattagacattttgtattattattattgttattagatagattgggaagcaagaattcaatattcaaataatgaacgataatgctttggttgtttggtcagagcttaaagaaaaaaaaaggaattagtatgatcaagaaaaaaaaaaccagagcagagatcaagaaccaatatgacaatctttcatttatatataattttattttcgtataacagcttttataacactatcagatgcccaaagatggggagatacaataaatacaaaaaaatagggaaaaaaaaaggagaacgaaaagagaaatagggaaaaaaacaaaacacacacacacaaaaaaaatgaaagaaaaaaaaaaaaaagaaaaaaaaagagaaagaaaaaaaaaagagaaagaaaaaaaaaagaaacaaggtttacagaaataggaaaaacacctattattttaaatatgatgtctttttttttttttttctttattgtaagtgaagttattcttctagaacaaagcaacaattattagggattccaataaatagggaaaagaaaaaaaaagaaaagatatagatgacaataacaaaaatattaaaaaaaaaaaatgaggcaaaaaaaataataaaactcatttaaaaaaaaaaaatctgattttggaaattgttatggcaacaagcaacggtaaccatgataaaaataataaataactaaataatgtacacacaatcacgacaccaacgtttctttgttaaagaacaacctcacgtccgttttttttatttttttttttatttttttttttatttttttttatttttcttttctttttgtgtgtgtgtgtgtgtgcttttttccttttttcctctcccttctaatctccaatttcgataaaaatcctattatcgtttctttttattatgccttcttctgtattactagtcaaaacacccatacattagttctgttgccatagcaatgggaggaggcggaggaaaaaacaaaactatttttctaaaactttcaacgcttctcttaatgtttccactaaaatagaataatagaataatataacgtttcgtttaaaaaccaaaaaaattacttatttttttgtttccgatcctccccttttcttctcttctcttctcttttctttttttttttattttattttatttttgttttttcttcttaaaaaaaaaatggaatatcatttaataacttgctgttaatttcataggcataacaaacttaactgttgaagaacggctaaacaaaacacatattatcgatgtctataagaaaaaaaaaacaaacaaacagctaataaaggataaaataaaaagaaaagaaatgttgttattgtactaataaagtgacaaattccaacgtttctcttttcttttcttcttttatttttatcaatctgatgttatatctgttgtattaccacgtattaacctgtggggggagagaggaagtgatgatgcattgcttctttttatttaatatcttccttcttaaatctgttttctttcctccagtaacacatacatacatatatacatacatatatatatatacaacaatatgtgataacattaaaaataataaaatgctttaagtatttgataatatataagtcatacacttacaatcttaccaacaagacagtgaaaactcttttttgctttaaatgcttaatccttcactctctgagaatggttatctttttagttctttctttctttcttctctttttctttaccgaattaatttaatttattattagttaaaattatgaataactataatctccatatatgtatttttgtattcatatcatcaaattaataaagcattatcgacatgctatgtcatacagattgtatccatttatatcaccagtgaattaaaagggaaaaacaaaagtaaaaatcttagttttcttacgtatatcaagcggattttttttcttttctaaaaaaaaaaaataaaaccctagcccatatcttttttatttatccgctcaaaaatatctaaattgaaaaaaaaaaaaaataagaaaagaaaataaagtatatttttagtaatcggatcagaatcttttctcttttgacttccctctttttttttttttttttttttctctcttattttcgaattactctaaccctacatatattactcaactaatccggaaaaaataaacatcagaaaaaaataaacctatatttggttcatctaggaaaacggaaaaagttggttatatcaataaagcacgtgaatatatcaaactaagaacgatgtgagtcatcatgacatgtgtataaatattatatatatatgtatgtagatatagaaaaaaaaagaaaacagttaggataagcaagaaaaacaacgtaaatcttaacgatgggtacagcttgtgtgttaatctttcttgtaaataatattcagtgtattaaataacaatcaagtaaggacaaaggttttctatatcaatgggttaaatagataaataaagtacataaaaaaaataataaaagaaagaaggaaagaaaggaaataaaatgagtatagatgcaccatctaagatcaatttcttcaagggacacccatcgaataggctcctaccgaacaatgaagtcattgaagccacaaaacaactattaacaccagagaaaaggccgtacgattcacaaactgagaatagacatccgttgacatatggatcggatgaaggggcactttgggtcagagaacaaatctgtgaatttaataacaaggaagtattccatatagataactcaaattcttctatattatctaaaccagaatttctcaatctaacttctggctcttcgtacggtatattaaacattttattacaaactactttggcacatactggatatactaggcaagcattcatcatcacacctacatattttttgatcaatgattgttttatcgatgctggtttcggtgatcataaattgactgctattgatgaatatccagagaccaattctatcgattttgacctattgcaaaaaaaattagactatttcgaatctttatcattaattgatggttgtgattacaatgatatcagtaataatattagcattagtaataacactaattgcattgtaaaccctgaaaaaaatttgaatcaaacaaaaaaaatttatagatatgttatgtattgtgtaccgactttcgctaatccaagtgggatgacattttccactaaatgcaaattaagattaattgaactggcaagaaaatacgatatgttgataatttcagatgatgtatatgatattctaaattacgatcccaacacacctacacctaaaagactcgttcatttagatagagaaagtaatactgacccagcaagttatggtaacactatatcgaattctaccttttctaaaatcattgctcctggattaagatttggataccaggagtcaatcaatagtaacttggttagacaactttccaaaggtggtgctaatatatcaggaggtaccccttcccaattaaattcaatgattgttggaacattattacaaaatggtgaagcgaaaaggataattaatcgcttaatatccgtttattcacaaagaggcaagacactttcaaatgcaattaagaaatacctacctaaaggtactatccataaacccataaagggtggatattttgtatggatcacattaccaaaaggttataattctatagaaatagaaaatttattaagatcgacgtatcagataatcatggctaatggatctaattttgaagtagtgacagataaaaggaactggggtactagatctgtcagattatcgataagtttcttggaagaacaagagattgaagaaggcgtaagactgtggggtgaaatatgcaaaaggtatgcagaaaaacatggattaaaattctaacacatctttccttgtgtaaatatttaaatgatattaatcaatttttctttctttatgatatggtaaatatcttttttatatgctgaaaaagatcactagcgcactgtttagttaaagttagtatcatgtacataatgaagcatcgtgcgatttatataaaaattcttactcttctcctcctctttggttttattcagctttctttttttttttttttttttttttcgacaattattctctctttggatgaatcatattgattttttatttttcttcaatcttttcaaaaaaaatatttcaattaaacagtctctctcgctcgatagatataattttataccctgctagattttagtcgttttacagttgtccttacttcatttatacctgtaatattggatacttcagtaagttgctgtatattaggattacaggggtaaatactgtattactatttacttttttctttacctaaggattctatttataggtttattatctattttctttcttaaataaaccatcaacagcactaagcaatacatcatggtagataacaatgaagaatcatattcaatgtatccaaatactccatcatctccacctccacctcacgcaaatatgagatttcccgtgtatcaaccacccactccaatgtatgtcagttatccacaaggaccttacatgtatgctgctgcaccaaatccaaactatcactttaaaatgatgaatcaaagtcagggtatgatctaccaaggtgcaccacaacagaataataatattacaagtataagtggtaataatgggatcaacaattcaggatctaagaaaaaatggaataataatagcaacaacctgataaatggtagcagtaatatcaatatggtaggtaataatatgtatcaaactaagagcaataattattaccaggctcaacattattataacagtaatgccaacaacaatcaacctctaattaataataaatctaattcatcaactgctttatatgacccttttaaatttgatgtctctaaatcaaactatagtaggaatattgatttaactacagatttaccacttttttttaatacaacaccagaagaattttctgaagcaagaaatagaaaatatgaactaaaattaaagtctattgaacagaaacaaaatatctcagtattaaaggcaaaagaaaagaaaaagatcactgatgtggggaaagctgtagaagcaataactaagccatcaaaaagttccaatgaggttactgaattagtaataaaaactgatgttaatagtaatgttaaggcgaaattatcaaatgaaaaacaagaagaaagaagtaggaaagttgaagttgttaaagaaaacgtgtcttctgatattcaatctaagatggaaaatatttcaaagaaagatgaaaaaccagttgtattaaccaagactatgaaatctgaagaatctaccaagaataagaatgataatcataaagataaagctaaggacactccaacattaacagaaacgatcatacataaaccagttaaacaaatagaaaccactaccacgaaagttatggaagtttcaactgcaaagccaactcctgtggggacaccaaagcctgctgtaaaatcatggtcagctattgcctcgtcagcagccgtaaagagtaagtcaattacgaccaagcatatttcatctgtttcttcatctgcaactgtatcgacgcccatttctgcatctccttcttctagtgttattactgtctcctctaaacaaccacaaaggaaagacaagaattatattcctccatctacaaagggatctgaaccgttaggttcccttgctttacgtgtctgttttgatccagactttgttaattatacattgacaaataaaaagaatggtgagaataaattaccagttaactcaattattccaagaggtattattaataatgctaatatatgttttatgagttcggttttacaagtattattatactgtaaaccgtttattgacattttaaatgttgtgtccactagaaacataaattcccgtgtaggtgaaatctcttgtgaattattagatgcttgtatttctttctacacccaatttgatcgtgaatattatgaggcggagaagaaaaatgccattaatgaaaaatatgcccatgaatcaaagaaagaaaaaaagatcggtatttcaaaacaatatgaaagagaagagtttgcttcagttgtcaattcagttaaacctgatcaattttaccaggttctatcaaagattccaaaatttaaagatctacaatggggtcatcaagaagatgcagaggaattcttaacacatttattagatcaattacatgaagaattcatctcatgcattgattgtctaacagaaaatgagattcagaatctattacaaagtattaaagatgagccacttaagatattttttattagaaatttacaacgttacaaaaaagctacatttattcaaaacgcctcatctcagttcaaagatttgttacacaaatatggtgtgatcagtgatgatgattcaaaagataacgatgatgatgatgatggctggcatgaagtaagctcttcaagtaaaaagggtaagaagactaaaactgctgctaaaagaactgttgaagttactccatcgccaatatctgaattatttggtggacaatttagatctgtattagatattccaaataataaagaatctcagtctattacattggatcctttccaaaccattcaattggacatctctgataatgatgtgagtgatttagaatcagcatttaagaaatttagcgaatttgaattactaccatttaaatcatctaaaggcatagatgttgaggctaaaaagcaaacattcatagacaaattgccccaggtcttattaatacaattgaagagatttgcctttgttagcacctctgaggaagacaaaaatatggctaactataatagttacaatggacgtattgaaaaaattagaaagaaagttaattatccacatcatttaacaattccaaaggagactgtatcttcccagtttttgaaatttaatgaaagtaatagacaatatgaattatctggtgttatctatcatcatggcgttagtccagatggtggacattatacagcagacatatatcataaggaagcggataagtggtacagaattgatgacatcaatattacaccattgaaacctgaagacgtcttagaggctgttgaagaaggtaccagttcaagaactgcatatattttgatgtatcaaaaggtttaattttatttttgatatttttttctttaactgaaatgttaatagcttctaaaacatgtaaactgtgtgaagacaataaaaagctttaaattaatgctgtaacaaaaatgagatttatgtactttttttctgttatgaaaatgttatttaatgtttgagagaatgtatatagcataattgttaaatatgtatcaattcaataaatatgtgttatagtatcattttttttcctgttatttaactggcaaatcatgcagaataatctaataatatgcagtagctaaagacaagataaaaaaaatataagctcattttagacttttaacataatgaaacgattacttctctggagttattagtttttgtaaagagctccaactagaaattctgaaatacgtagtctgcaagcaacgcctaatgtcgaggcaaacaaaatggaacaaccgaaactctgggcccaaggttgtgagtgtatttgaacgaacaaacgatcattgaatagacattagtggcaaattactaagaaacttatttaagaaacctttcattatcaacagatggtatcaggggtaattatcagcattacattcacattttatttcctaagttccacctaagggaataacaacaacattaacaaaataataacaagaatatcgacaataattaggacaaatctatttaataattaggataaatcaattatataatttgcaagtgtttatatatataattaatatctctattttagtatactacttcagataaccacttaaatatataaaattgagtaattgattgcgtttcagaaacgtataaaaagacaatacttttagaagataagctgtcttacgtaactcctctcttatatgtaatttttataatatatataaaacaatcaaaaaagatcaagcaggaaaaactaaaacaaatattagatcgatatagcgaaatacaataatcatttaatatattagctattaaaaccatatagtaattatttgattgtttgcaacaattactgttatcgaagtaatatccttcagatgttaactgtattttccaattaaatcacaaagtaaattattatttatatttttttattgtgaaatgaggtttagaaatccgataatttaacagatggactaaaacggacagatgaactgacggacaattaattaaatactatctaacagatagatgatactaatggataatatagagacgatatattaatacaatatttgttatttatttattgcttggttgcttccttttattatatacattacacaaatgaatatttacgaactacagtctatcttctgataatgtcatccttttatatgtttctggaactctatcaatcaaccaacttggtacattatgaatcaattcatacattatatttaataactgaactagctcgatgaagtctcatgaacttctcaagcaatataatgtgtggcaaacagtcgcactttatttgtttgtctattatatttactatagttacttttttatgtttttcttttattcttcctaagttgattttaacttatttgggaaacacaatttcttttctaaaattttatttttcattttatttcaaaaccttaattatcattcattaatgtcactataattacgtctgatctgcaacattcttctgttatgctatgaagtggtcaatagtttggtattattcaggaagtgcgaggaatatctaacagataatctattaataatcgagacaataattaatacaatcggtaatgcaattattaatacggtcttatatattaatgactatatcgagcttatatatttattcttatcgttgtcgctttgcttgtcgttttgcttgcttctgttatcttgttattctcttttatttcccagatatatattatgtataaaagaggagttatggaagctagttttcatcttcaggaaatgttgatcttttgtatgttttctagaactcaatcaactattcaacttgacatattaatggattagtaatctgtatctttattattagttacaataatatatttgaacctcctggaatatttaaaataataggttatggtggtacagtgatagaggtatataaacacactatacaaaaataggtgataaatgaacacgttgtaggtaattttagattcaacacggaatcttatataattttaatggtgtcaactaatttattattgaaggattctattgtggaatagaatagttataaccatcaagattacataagatccggaatgaatctagaactatttattgtcttaataagccatacacgtgctacaacattagatgctgcataataaagagattggattacataagattttaacaaatctagaatttacctattgttttaataagtcccacgtgtattactaatcaccataattagagaattggggtgcagttctaatccactagtgcacctaaattaatgtaataaattttagggtgaattagtcaagtcattaatgtactaatctgaataatcgatcgagctccagaaaacatataaaaggaaaacgttttctggagataaaagatcttccataaccgtttcttgtaaataatttatatattatatatgaacaaaaatagaacaacaagcaagtaacaagccaagtaacttcgaataaatatattagctcgttataagctgcttcaatatataagaccgttttagtaattatattatcgattatatttgattactttctcgattacttgaatagttattaatattatttgcgcttccctggaatatacaaagaatttcaccacctcgtaatacagcagattccggaggtttggagcgtcgtggcgcagtggaagcgcgcagggctcataaccctgatgtcccaggatcgaaacctggcgacgctacttttttgtgtacgtttgtaatattcctgatattactgtttagggtttgtttagaaaaaagagggttgacaatatttttctaaactttcctttttgcaaaattttacaaacatacataaaaacaggagtaaccaacacaagtacaagagagcaactaagaagaaagacgaaggaagtaaagaacagggaaccaaggattacataggtttagatatatagtatataagtgtatactattaggttaacttagattagggatatagacacatagatatataggaatattacatctagagatatagaaagagtgtatattttatatctattcaagtgaaatattattgagatttcaacaagattaactgttatcagaaacacataacctaagggttattacactaaaaaaattgtaatagatgaaaacccgattacgagagatatactcttctagacgctaaaatagatagatgtagcttgaattgttctctatatatgacatataaaccgtactctacataaagagtaaactaatatatacagataaacatagttatataaacaagataaacatgaaaaacaagaacatcgttgtcgattaaagagttcacaagatcgtttatagtgacatcaggatttcatgtgtcacaaattcataacattgtatatttaacttattagctatgagcttttaatagcggtgaatataaaataatattaatgcatactgacatgaataaatgcaagacatagacttactctatatctttagaggaatcattaaaaatattaagctaatctaaccaatattaactaagtaatatagataatctacttaactatcatagttactctacttcttagtagccctccttcttatatttcaactaccaaagcttaattatagaattttccaatgaaggaaagcctaggaaattattgataatcatcatttttctaaactaatagttacaaccttaacacattaatgtttgaaagattaaatttatcccttctcatggaacaaacttcacattgtttcttttgaatttaccatttaacctcagaaaagctctcttctgcaagatctgcttccattttactatactaacctggattaaatcaacttctgtgctacttctgcaaaaaggacaattacaatatcccacaagggaaatattcttatttattgcttttaaaactgcccattccttcaatctatcaacaatttcccattatcaaattgcatatctgatacaaaatcagtacttatagcctcaaatcactttgttggaacttttaactaataataaacgtcaacagataataaacgtaacttttcagctttctaacatgatttgtaactttttacaatcttaataatcatatttttcatctttttccaataattgattgcaacaatattagcagttctatttacattaggatgttctacagtttttgaactatggtaggtacataatattttatattgtagttctttatcaaaaattattagtctatcttagaatccaactattgcaccataacacagtaattgatgtcttttaataattgttgttcactcgactaagtattctttcttcccttttaaaatctcagatactgagatgattgagaaatatattgtgcttttagagcttcctaattttctctaccataaaattgtctatattacgtgtaccaccatatattttttcttgatgataattctagtcaaattattagtcttattatgttcatccagaataaatttaacttgaaaaatttaatatataagctaactaatctatatttattatctactattcaatttagtactcttcataatggtttctaatgatttgtgattaatgtttaattcaaagtttctaccaacaagaaaatgtttccatgtcttcaacacacaaacaattgaataaaattccctaccatggattggccaattccattaaggctgaaacaacactttacttaaataaataatgatatctataaaaaacttacaagcatctataattacttcgatcctgtatgtatctctaaatggaatataaaaccggaccattcagtaagttttggaatgcaattgtttgttatatctttcattcttacttaccaccatatatagatataattattgaactgtatgactaaatttcctcacaaaacgtctgacaaaatcacacattcataaaaacagttatgtctcttttgatttcttcaaaactagcgattttataatgaccttacctttccctggatccacacgacttctgtcaaaatcaatgaaatattctaaccgattcaagctttgtctacacaaattacacctctatttcttaatatataatttaactgatctcagaaacagaaatacttttttgaatatccttcacattttgttcacttgttggaacataaaccaaaatatcatccaaatatatcacgaaatgtgttattttacaaccatttgaagtacaagtataacatttattatagaatttactattaattcaatactactttgaaaacgtatgattttatttttcttaatagtagtaattcttttatttgataaaacaatctctaaacttaatatgctttttatatagagttcgatacaataaataataacacttattccaaaacgattatatcctctactcacaatcaatgatctaggcacattttctgtcttatgaaaacagtgctttataccttactgtcagcaactcaacagactatacatatatgtatttatcagaaaatgcacttacatatgtaacgtaaacaagaatataatatttgtggctactcattgtggcatttttagaaattatgtaaagatttaaatgatttttaatggaaaattaactaatattattgttacaattaaagtttatgtaagatattatctcaggtaatatattaagacaagaatatcatcaaatacaaacatttgcaagttataaactaatttgttctaatcaataaaccaccgatactattttttttagtgttcttgttatagtttgtaattacttttggcattctctttcaataatcagaggtttcttagataagtttttcgaaaacttgccacaaccattaacttaatggtcattcatttgatcagcttcaaagcctggatccagagttttttctgttccaagttcttaatcttaatgccaagcgttatctgagaaaatgcgtatctctaaaattttaaattgaaagcctatagtatataaaaaaatatttatgcaaaaaaatacaaaaattaatacaaagaaacaaaaatgaccaagctaaacattaaataatggatattgcaaataaaaaaactgtaatatttacaaacgtttaattaattaattattattggagttgatggtaatagtaaaatagatataatagaatatgattacaatttcattaaattatgagcatcaatgacagagagttgtacatttcaaataaaaaaagaattacctataggtaatatatgtaagatgcagaaacaaaaaaaaaaaagaaaaaatagatagaaagttagcagattaaagagtcataaaaaataatccatttgtggtttctttgtcggtattattgcattaccaacgttatcctgaggttgtacagcttcaaagatggtatagtctctcgacatatcatcattcacttttaacaccgcagcaatattcccacatctatagcagtagttaggagcagaccatacagtgaccaatccaccattgaacatttccttatagccttccataactaattgatgtgctcttgcgattaaattaaatccattttcgtataaaaacttgttaacttcattctcaccaaacagaaaacccgcaccacgtggagacagtgaccatgtatccacatcatctgggtcactccatagtagatcacacatagcaccttcatgtggtacctcttgctttctatcaatggacctaatttcctgtattgttgatgcatcaggggataaaccgccatgaacgcaaaatatttgactatttataattgcacctaatgaaagataatcgaatacttcacaacaatacctccaaacattactattaccatattttctcaatatttcatcataaaaaccataaactttggtaatttgtcttgtttcatggttaccacgaatcaaaatgattctatcaggatacctcaatttataacataataataaaagaaaggactccaacgaataaaacccacgatctacgaaatccccaaggaaaatatatcttgtgttctctatcccaccactcttctgaaaaagggtcaaaagatcatgtaattggccatgaatatcaccgcatattgtgactggtgtatccacatgcgttacattagcttcttgaataaacaattcttgtgcttttaaacagatggaataaacaattttctcaggtattaacttacccaattttaacaattcaataatttgctcaatgttaaacatgataggcaataaatatacaaataaacgaatggacttgaacaaaatctggaattctctttctttctccctgaaaggttttattttagtaataatattactgttaaaatatttttttttattttctctattattacagaaaaaaaaaaattctccactctaaataaatagtatatatgcaaaaaatcaccagataccaagatgaacaactatataattttaatagttgtataataactgctgcaactagttagcatgtacatacatatgtgcaaaaacacaacacaaacacatgtatattcatgtacatgtctttatttcacaccactctagacattttacaattatttgttttcgtttctttttttctttttttttttttcgtatgtcggtgtgtgaaaaaaaaaaaaaaaaaaaaagaaacgaaagaaaaatcttgacagtaaaatctggatgtatgggtttgcactattactaagcagcatgactaagcagtgcttgttctttatggtaaataatcactacaataccaatagatactcatacaacaatgtattggaagaaaatcttcattcgtattcttctgtaacatagggccccagtaaagtatgtgtaataattaatattaataaggtacccttacattgtaaagatcataatgtgtactttagaatagtttatttcaaaagatgtctatctgtatatttatgcctctatggctctttgtacacatgtacgtgcaatgaaccatgcattgattagccaccatggcctctccaacaacccaatacacagaccaaaaacagcatacgtccagctaaaataaaagaaatctgcaacgcgtaacacgtaaacaatttttgttgcagataaaagaataatataaaacacgttaattcaatacttcgaataaagaaatttcaaaatatggaaaatagaaagtaataaaaaataaacaaaaaaaaaattagcaatgctcgaataaataaagaacgttgcaaataatatgaacattacttcacacttacacatttttctaaagcatattgataataccaacttaactgtgtttctcttttagtatttttggaaggagaaattaatgcaaattttaaagtttggtaaaaaaagaatttggtaaaacagcaattaaataacataagacccaggacaaatatactcaaataagcaaaaagaccaatcaaagaactaaaagaaaaacttcatcaccaatatcaacaacaacgaaaccttactatcataaaatgaacaatttatctcttttaaagcagtctaatccattactgtttacaccagaaagatacgatgaatatccattagacccaattgagttggctcagtttttaaataaatccttagaaaaagattcaaataataatatattgttacgtgaaagaccatttacctctgtggatcagttagattatttattttatttggattctgatacacaggaattggatcttgataaaaaattggctattgaatatgctctttttcaattacaactattaaaacaagcagaagcaataaacagtgacaacaatagcaacaacaagcgaataaataagaacagtaataacgatttttataatgctgttaaggatgatgatcatgatgggttatctgattttgaatctttacgaaattctgattttaaaagtttaaacggtctgaaaaaacttttatttacattaaataaagttaatggcttagatttagatttaaatagattaaatcatcttgagtcccaaatccactacaaaagctctagtgctaacattaatgccgtaaatacaatcacagctacctcttctcgtactggtattactaatgattctagtatatctaacgaatcattacataaaactataaaaaattttgatttaaatgacgaaaatccaaaagaaaattttatagacaatgcatgcactaactcagctgatgatagcattcaagaactaacttcatatttattatcaaatactattaagaaaggtatcgatttaagaccgaaaggtgaaatgaatgattcgacacaatttttgaaaaactgtatcgattcactgatcgaggtaataataacaaacagaacaaacaactctgtttctcaaattgaagtatcaagtagtagtaatcataataataatagtaaagatacagacaaagataaagatgaaccaaatgcattcatggattcaaagtgtaaagaattagaaactaaactagctgaaatgactaccgcattcaatgatcttcagttggcacataattttttgactaaacaatatgaaaatgatcataatgattcaatgaaaaatattgaaaaattgacaagaactaataaagaattgcaagaaaaaatattaaaatatcactcaattttgtctaaaagggaagattataataaaatacatgaaactgatgataataatcagagtgacaccattaatagagataacgaaagttcgatttttcatagttcaaataaaagctttacttcacctatctttggacaccgtgaaatttggacaccacaaaccccttcatcaaataaaaacaatatatctactatgaataatactatgaattcaccatctttatcaatgatgaaaaatgaatttagaagattactgacagaaactcaacgtaaatatgaaaaagagattgatcaagagagacagattaggaaacaacttcaatatgaattgaaccttgttaaaaaataaccttcacaagttattattcgttcaatttcagctgataacttcatgacatttcatatgaagttttttttttgttttatctatctatttatttatttatttagttttttttttgtttttttttggtggtttgtataaacctctatataataacaataacaataaataatcgtgcaatagacaatatgatttaattttttaccctttttttttctttcatattaactttctattggattcattaacatgtaacgtatttcctaatactaatctttcttcatttaagtaaagaatatagacaagttacatctttctaaattcgcttaacacaggatagatagcttcaaaagcttgataaatttcttccctttgttttgcacctgttaagacaattttaccagaaacaaaaattaatagaacgatctttggcttcaccattctataaattaaaccaggaaacaattcaggttcatacgaggagaaagtgccatgactaaatgccaacccttccaatcttattggaaattttacatcacatgaaccaacaatattttgaatcttaaaatctgtaaattttgcagcaaatccaatcttttgaataattcttgcatattttctgcttgccaatttagagtcatcttcacttttagcaccagtgacaaccattttaccagaagcaaaaattagtgctgttgtctttggttctctaatacgcataatgacggcagcaaaccgttttggattgtattcagcattacgtgcatgtaatgcaacagttttcaaatctagtctacaacctaaatttacagtagccacaatgttttgtaatgtaggaactatcccagatgttgctgcatcatcctcttcatttgtatttgactcatttttagctgtctctatattctgttgttgttgttgctgtgacgttatattattattatcatttaatgtgctattatcaacatcagttgtactttccatattttgattttcccagacttgtcttgtatttggatcaaatacgatcttattggcttcttgaaatttttttaaacgggcatcatcagacatagtaaacttttctaatacaatgtatttgtttatttatctttaactgtgtttgtgatctttgctaaccgcttttttataatacaattattttaggacaattttttttgcaaactacgatattgttcctgttagtacaaatataaaacaggtctggcaaattacataattattctggatatattaagtaccttagttaacactctttccactccttccctgttagtaatctttaattagtttattttttttccacagaatatttttttctctttgaattttactttttttatggtcttttttttctcctgtgaattttgatgttatttcagacggcgatgagctttaaaacatgaatatttccagattgaaagtgtatataaatgtacaacacacacatgtcgtaatatgatttgtgtacatcttttttatgcttgctgatattctataatttcgcagatccagttacttcaaataacaatataagactagatatgaatctacaacaatggtattctttagctctagagtatataaatgcggcacatgagaacagtgagttagtaaagaactctaaacaagtcgaacaatattatcagttgatagacttagcaatccatatactgatgagtttaaaggatagtggaaaatggtcgctaacgataaaacaagatctgtgcattactatgcgattagttaatttattactagaagagactttaaatattgatatggctgaaaattatctttcatctctattagaaagattacagaaccaaccaatggatcttacaatatggaattatcaaaatctgattcaatattggctactttatgagataccgattagaagaaacaccaattttcatttaaggattgcgttacataattatcaagatttacttagcaatcaagttgattataaaaacgagaacagttggttttctgttaatgcagagttaaatacatattattctaagatttggccttctatatttgaatatgtagcaagtcaactatattgtagattacgtaaatacaaatcggcacaaagaaaattagagtctttgataaaaaatactaatttgaaaatgatgtatccccaatggtacgtctttcttttcattaaatatattgcacttttattaggtcaaagattatctatcccagataatatttggtcccagttaaccaatgatgaattatttaataactgttctatcattgggcctatattatacagctggaaactattattacaattatgtataatgattaataaagattttaatattactgatatcttaaaggaatttaaagttttatttcaggattataaagaacagttgtctttgaatgatgatttagatattatgatttttaagatttcattagatgacgataatgatagcgatgtcagtgaccaaaagtttatattaaagtttagatttgattcattcttgacatataaagatattaaattaatattgttattattacaaagtgtcagttatttagttaattgttatgacaagaatgcacaattttcaattaaatttttaccaaaagtagagaattcattaaaaatgattcttcaagatggagtctgttcaaattcatctagtcaatcaaaggaattgaaatcacttcttaaacaagatactgttttacaatggtataataatatattagagtattgtaaattttatcaagtttgggaaaaaatgctattaagtagtccagatgcttcatcaagtatgtctgagctagtctccatggaagatagtgctactaaaaataattttatctgcattaaatccatacctttgcatccattttataaagatataataaagacgattaggaaacaaatagatcttccatttactttaaataacaataattatgatcatgatttacaaattaatgaaatactaaatgattacaacaaaatgattaaaaataaagttacttccatcgaaattaaattaatatcattattaaactcatatattctggttgtatcaaaaatatccaatgaatctgattcaattccatttcaagataaaagtatgcaatcatatataactcaaacaaatgaattatggagccaaattatcacaatttatcaagaaaaaagtgaaaataatggtaacaataataatgatcgtattgacattaaagaaaatatggtttgggattgtacaatagttataatatggattataacccattttgaaccatttacttggaatcctttgccaagtaatgataaagaaagaaacgagtatctcaaaagattgaaaaaatattatataaataataagattataaatcataataacgatggtggtgacaacattaatttaaaaaatcaatatattttgaaaaaatctatgttattaaggatactgattaattatctaggtggtaaattgtttgagactgatttagaggtgttatgtcaaatatctttaaaatgttttaagtttgcgaaacaagataggcatctgattaatatccgttatataattggattatggcatttaatgaactgtacagttgctatgaaaccaaaagaagtcgcatataccacagccaaattaaaccaactagtccaacagatgttgaactcatagggatctaaaaagacaaaaaaaaaagaactgtgggaatagatagattacgtgaagcaatgaaaaagtgtaaagaacaattcacattttataactggttatatcgttacatacatctatcatcaaatttttttgtaattacgtatatttatttaaactaaataaagaaaaaaagtgatagaggaaagaggagaatatatgtatgtgtaaatatcacttgtattttcaagtgaaatgaatgatgtattttcttttttattatattatatatcttttttcccaccaggaactaacattacaatattgttcccacttaacaacattcttcctttgtgttccatcaccaattcgttttgatcttcgttaactatccattcttttgcgtcttctacgatcacattcacaaaatcatcaaagccaataagggttcctgtgaactctctatttgattgtaaaatgatccatacaggttgatttatagtcttgtcaattacctctaatggtaaaatatcagttggtgcactcattttcactgtatatttcagatatgttatttttttttagatttattgttctccttatatgatttatttaaatatatagctttgataaacaatggtactattaatttaaatcaatcatttcttattagaaactttaatactgaatagagataatttaaaaaatctttaaatcattgttacttattttatttttcagttaactttttatgtttcctttttcattttattaattttttttacaggaaaacagaacaaaatcctctatatattgtaatgttaaaatagggtttattgctttgaaactttttatttatatatttacacagatataaatatagggttattataaaaaattagcgaaaaaatacttaacctaatacagtatattaatgtcatttccagttggttataaaaaaaaaaaataatctgggtgtcacaaggaaaggatttattgtttctctcgagaaaacagaaaatgttgtcctttgtttttacttcctacgatgccaaatcttgaaataacaaaatgataatcaaaatcagggtgcattctagagttcaatgacagcctttttcttcaacaatctaccctttcttctctttcttgttggttcactatttctctgcttgatgattctctctttctcgttgttatatgattaatttatttggaatttttatccactaaacatcgctatttcaatggaatttagcagcggcccattaggtgcaaaactagataagaactcttttattttttttattttgattcaatctgtaaattatgcaccttattaaggaagctgttattgagtatgacaaaaaaaatacatatcgtactgtaagacaatagcatgtttgaaaagaaccgttacatttcttgaagggatatctcactaatgaatagttagttaggtatatatatgcatatagatggttgaagatggataagttaaaccatcataatgatgtgttggtaagtagctatacctttcaccatcgaatatctttcaaaagtgtcacaaggaagaaaagatagcaattttatttaaattaaatatatcatatttattttttcattagcctagtcaaccaattaactggacatcattatattattcgacgtataaaacaaaagatggccaataaagttttcaatgttgctgtcttctttgttgtttttagagagtgtttagaagcagtcattatcgtctctgttttattatctttcataaagcaaacaattggagccaaagataatgtgttatataatagattagtgaaacaaatttggtttggttcagttcttgggtttattatttgtttgattattggctgtgcttttatcggtgcttactattctttacaaaaagatatctttggatctgctgaagacctttgggaaggtattttctgtatgattgcgacacttatgatttcaatgatgggaattccaatgcttagaataaataaaatgcaaggcaagtggaaagttaaaattgcaagatctttgatagaagtaccaaaaaaaaagaaagattggttccgtattgggtttttgactagacgttatgccatgtttgtattaccctttatcacagttttaagagaaggtttagaggctgttgtctttgttgctggtgctggtgttactacacaagggtcccgtgccactgcatatccactacccgtagctgcaggtctgattgcaggtggattgataggtttcttattatactatggtgcatctcattcttctctacaaatttttcttatcatttctacatctatcttgtatttaattggcgctggccttttttcccgtggtgcttggtacttcgaaaattatttgttcaatagagccaccgggggtgatgcttcagagggtggtgacggtaatggtacttacaatattcataaatcagtatatcatgttaattgttgcaatccagaattagacaatggttgggatgtctttaatgctttattaggttggcaaaatactggctatttatcttcaatactttgctataatatctattggttatgtctaatcatttacttgattttgttaatgtgggaagaaaaatacggtcatttgccatttactaaaaatttgcaaatgaagcacttaaatccaggctattggattaagaataaaaagaaggatgagttaactgaagaacaaacaaagaatttgtttaagcaagtagagaatttacaattaaatgaaaaaggtgttattgagactgttggttgtgaaactgcaaacttgtttgaaagtgaaaaggatgggaatgtggttacaacaactaggatagagaattctaccaaagctggcaaagccgatcataatatcagtgaattcaataaagttgctaccacttctactatttcattgtcaaaatcaaaaactgaaccctcttgagttcaacaaatagaaacgtatgaacctgaattgtttcctggtttaatttatagaatggtgaagccaaagatcgttctattctatttaaaaattatattttttattctattttttagttataacatattaattaaaatcttaattttatctctttttattctttttgtgtcatgttatgtattggtaatattaactgtttgtgttttttgtaatactttgaattgaagaaaagcagaataaatatcgttcaagaaaaattactttattgaatgatcgtaatatcattatcaaacactacaatttgtcaaatataggaatatttggttttgtgtcactaaacactagctttaataataaaacaatagccagatatcgtcaaaattgcttctgcctcatgtgcaataaaacaatacggtagcaccattcttattttaaatatgtaagggaagactcagagatttatgttcaaactttcgaaaacaaggtctgtttttacatcgtctacctaatattataggaagcaaagtgacccctttgatttaaaaagtatatatttggtgaggtgggattgaaatcatatattgtaggttataatattttttttatcatttttattaaatactaaagaccaatgaatattcaaggaggaagtttatctgatctcattcaagaatgtttacgcttgttaaataaatataattatttatgtggaaaaatccaggaattatcaactcaaaagaataaaagctactatgtcaactgcgctgaagcttatcattgttatagatattgccgtactttaatattggagagggcggttaaaatgaatgattttaaatatttcaatagcacaatcgttaacataccgaaaaacataaaagagaacccatctctaatttctatatagatcaggttgaaaagtttgttattagtagacatacggattgaatggatcacaatcgagttttatttttatgcttgttgaaatataattattagagttatgtttaataatctaaattcatcgtactaagtgatcaaaagttatgaaaatttatagtaaagaagattcaaagataaaatgagtatactgtataatattgtatcttgtatattacttatatagaaaggaaaggaccaaggaataacttataataccaccaatatcctattgtaagttaccttatcttactatattagtcttaaatgaactctactagaatgtttgattccgaagccttgcgtcaacaatgcttactgtaacttcataaaaaataatagttacttaagaaatttattgtcacattcttggatatctatgtattcttcgaataatattttgaatctaaaaaatactttgaatttagtaattgaaatcactagaaatcaagaacactcgacagtaggaagtattatatgtgaaagaaactatattagaatatcttcaaaatttataaatattaatgaaaccattgagcaattatacgctaatttagaacattcattagagttcttaataagtgattttatcctcttcaagaaaagatgtaattttgattatattattttaatcactacagatgatactaatataattgataataacatatcaaatacaataaacttcaatgggaatatcattaaaatgcttaatctctttgaaaaaattgctaaaaatttaacaagaaagaaaaaatcggaagattatgctcacctttatgttggtattattaaaattaataaatggaaaaatattttgagtgccactaggaccaataatgataacaaaatgataaagaaatcaaaacattttaatagcacagctagtacaaataatgcaaatgatagtataataccaattggcattcataatcaaaataattcttgttacattaactgtattattcaaagcctaataggaactgatgatttttttaattggatattagcgtttaatgctaataaagaattacataattcatagaaacaattatttgccactaatggtttaaaaaatctcttcaaagatattcatgattgtaataaggtaaaaacaaatagaataattaatattgaatcatttaagtatatttgtggtattagatgtagacaatttcaggggaatactcaagaagattgtgttgaattttgtaattttctatttgattccctcaatactgaattgaaagcaatgagtcctatcccaaatagctttgtaaataaagaaatgtcaccttataatatgaattggttgaaatatttgtctgagaatgatacaatcattacatatttatttgttggacaagttagttccagattgaaatgtaagatatgccatacattatcagtcaattacgaggcattttctatattgtccttacccataccaaatgttgttacatgcaacattatggaatgttttagacaatttttcgaagaacagcaattggacccaccgaatcaatggaattgtgtcaaatgtggcataaagacaccttctgctcaaaaaataacacttataaaaatgcctactattttaattattcaattagcaaggtttcacaataatttaatcagaaataattgttttattcactacccacttattcttgattatcgatatacaggagtactaaccaattcttatacaaataatttcaaatatgaattatattcagtagtatgtcatcagggaagtgttaataatggtcattatagtacatttgtctataaaggtgataaaaatggatggtattattttaatgacactatttttaaatcaattcaaacacttaatgaaattatcagataggatgcatatttattattctatagacaagtcaagtgaaaggaaaggaaattagataaggagaaatcagagcaaatatatgcttagtatattaatccctttaaaatagttgtataataaagtttataatatttctattgggatataaattattttacctaggataaatatacatatatatggacacattttttttggatgaattcctaataatgtatccttgctttctttctctaatatgtttattttcttgacaaaatttatctatttatttaatttgtaaattatcataaaaaaaagcttgttggttcattcttttgtgtatgtatatgtatatgtatatgtttattgaaaaagtaaagctgcagcatattcagcattaccaccagtagtcctcaaagctcgtataacttcgtttcttgaaaagcctaaatccattaattgttttactatcgattccggaaaattcatattagacagtatattgtttcttgattgaccactaataccagatttcatattactgatattattgtttcttgggaactgttgtattggaatattattatggtcattaacgttgcttgtattgtttgtgttgttgaccaaaacagagcccccagtggatgttgaattaggtatggttgttggtttagacaaagtttttgaggcggtttgtttaacttcattttcaaaacctttcggaatctcagcttcacttaaaaatcttgtttcaattcctgcaatccttaaaacatttttagctaaatcaatacaagcttggtgtcttttcagcatgtcaagtccaatcaagacatcaatttcagtatctaataccacaaaactgttgcaaatgtattgtgtttcgatctttatctgtgcttgatgaatcctaccaatgattttacctctgcctacacctctaacttcacctataaaccgtctatcgatcagcttactgagcccagtcgcttcagctaatctagttgacattatagtcatttgtgcacctgtatcgacaaaagctttcacaggatgcccattaatttctaggttaatatatagcatacttacagtagtaaatacttcaggggtatgttcataagcatttcttaattgctcatctatagcttgttggtcaattaattcattgattcttttttgattaattggattatctgggttactcatcaatttattatattcatcttgtggaataccaaagggattcaatgattgctgataaaaaccaccgtaccttctctgtaatattattggccccattctttcatagaaaagatttgaatcatttaatatggaatctagttcaggcatctgtgttactaactgttgtctcataggttggctcatatttaattgtttcctgaattcttccacatattttctattgtccaagttcccaggtggaatgatggaattgtttggattattgtttgtttgtattttattttttattaataatagttcatcgttgtggagacctatttcagataaaattttatttttagatttatttaaatctaaaatgtccatatttatatatagatcatttttcaaaggatcaaactgacattctacttcaagcaaggctattaagtcctctagtttcatatcatcattgatttcgatgggaccatagatttgcccggtaatttcatttgatatagttaaatgcatatttgaagacacaatttgaatatatttataagtaaatctcctttattataacctataattgggagtttcaggattatagggtctattagaaagattgtagtatattgttttgaaaacttcatagacccacgacaattaacaatctacaaaggtatcttttacctttttctctttctatcttaatctgacattttgggaattacataatctttggaatccaacccttacacactacaaagaaaaagaaaagagaaggaaagaacccaaaaaaaaaaaaagaaaagaaaataaaaaaagaaataaagaaatgtgagtgatttcgtttctttttgacgtcccaggcgagagacatccagacaccacatatttttaattactttagtggagaatcaagacaagaaacaaaaatccatagtgcatatttattcatatatatgcgataaagtaggagtgaacagagctgttaaacctctaaaagttgaacaagtccatattgatcctataaattgcaattatatgatgggtagaatagtgatttacctttagttttttattgtattagtaggagattttagagagaaaagtaacagaaagaggaccagtcaggtgggtagttaaacataacaataatatatatatataagagtatttatatcaagtaatcaaaactatattgatttatatgcttttttatacatatatacattaatatacatatacctgcgtaactaactgatgacaaatttgaaaagagatcggattgatggcgataacgacaatgataatgaaggtttaaataataaaaaacagaaattagttgattgtagattaccttctcactttattgaattacattcagaatccttcattgaagcatgtaatcatgtattggaagtggaccccactttattacctatacttactgcaggtaatttttctcaatatttgaaatctgatcagtctataggcacttgtaaagatcataataataataataataataacaatacagttgatttacaagaatgttttagtaaactagctaatgctattattgggcaacagattagtaatagggctgcaagaagcattagagaaaggttatataattattttgatggtcaatttccagctttcaaaacattatatgattctttgcaggaccctattataagaaaagaaataaagtcctgtggattgagtgataggaaacttatctatttagaatcgttatcacaatatttcaatgaacgaataaaggagattgaaaccttatttactttagatactaatgattatgaaaacgaccaaaggattattgatcacttagttaaaaacattaaagggattgggccttggactgcgtcaatgtttttaattactggtcttaaaagacaaaacgtttttactgcagatgatctaggtattgctagagggttttctaactatatagcaacaagaaaggagctattgaatgatttaattgagagaagaatctcaattaaaaggagcaaaattaaacataaaaagtataaatggaaaatatacgataatgatataattgaatcctgtgctcaaaaatttgaacctcatagaacattatttatgtttttattgtggagattatcaagtgataatattgaagatatggttaaaatacaagaggaatttatgcaaaactagaatgactcaataaataaataaataaataaatattataaatgttcttttcatcaatatcaacaatatatgtaaaaatttttttttctatttacgtgcatataaatcaatagatactgatgatcaggaaagaaaaaatcaagaacaggtattgattaattatttacagttttttaaatttaaatttttattttaccttttttgttccttcttcatttaactaaattgaatgtttctgtaacaattctctttccgacattaccattagcctgatgtttcaaacgtgcagccatagatgaatttataacattcttgatttgcattcttggttttctcaattgattcataaacattaaagacactgtcactagagctaatgcacctgcttggtgagtagatgctaaatggattggtacagtgaataatattgtagtgatacctaagaaagcttgtaacgttacaacacccatcaaagcatgtaaagtcatttgagagttccttgggatgagaggtttcttcttgattgcatacatatggacgtagagaacggcgcaaaaagccaaagtagcaaaagttctatgaaccaattgaacagtggttggattctccaaaagatttctccaccacaaatctttttggtcatcacgacgtgtgaagtttggatccattaattcacgtttacttggaaaccaattttctcccatcttaggccatgtgttatagattaaacctgcgtctaaaccagcgaccataccaccactcatagcagttataaatgatagacctaataagaagatagacatctttcttaatggacctaatttactactatccaattttttaaacagttcaatacatttttctggattctttaaccatttattttctttcagaatgtcaagacctgtccaaagcatacctaaatataggataaatgcagtacccaaatgagtagttaatctatattgagatacagttggtttggattttctttcatttaattgttcttgatctaaccctgatttgaccatccaccaaccgacaaacccttgtaaacctaacaaagagcatagatagaataagcgtttattgacatgaggagaagttctttttctagcagcaaaatagattgcaggaataacaaaaacaaggccaatggcacggccccataatctatggatccattccataaagaaaatgaatttgaattcatctaaattgatgtgagaattcaattgttgaaattctggtgaagacttatatttacggaattcttcttcccattcctcttgagataagggcggcaaagaacctgtgacaggtttccattcggtgatactcaatccagattcagtcaaacgggttaaaccaccaagaataacgataccaaagactaatccagatgtaccaattaaccaataagcaacttggttagaagatgtacggatattggtggtagtagaagtagcagagcttgatgagtctgatttagaattatggcaggtagaagagaaagatctggtaatattcatagtagtggtagtagctgtagtagtatatttataaagatcagatcttttcaaaaatacattattagtatgattccacaattctgttgtgaaattgttagtaattttagttgacatgcatctaacattttgtgataccaattttgttcgatttaatagattatttcttatacatcttggatttgaaaattttgacacttttacagtatcaaataataaatttctaaacatagggaggggaataaaaaaaattattctgttaaccttaagttgaatctatctatatatttatttatttattcccgcacttacaaatacagtgattaacttattaattacttaattgtttgtttgtcttttatgtgtgtgttcgtacaggtaaccttcgagaaacttaagactatttgtcaaggcaaagagatcttttcttcttcctttatttcgaaacttttcttttattcttttcacattgtttgtaatgttatgtcattttatattcctttaagggggtaaggaaaatgaggttttcttcaacaaaattgcggaattttaccggatgtgatgggagatcacgtggcaagaagcagtaagaggtgaggagatttgagcaatctgtttttctttgcatgcctctttttttttctttgtttttttttacctttttcttttgttttcttaacctgtcacatttgtttgatacaaggttttgttgcggttgctctttttcttcttggcggacatgctaataaattaggcttactgagtatttttcgaggaaaagtaaaaaaaaaaaaaaaacaggaccaaggctatatgctattttgtttgtgaatgttcaatttagttacataaaaccatttttattaaaagattcgttaactgtgaatgaaatggacattctgactgaaaatgcacaaataataaataactaaggttaaatataggtctagaaagaattggaagattaaaaattgttacattgtttcgttctttcattcttgtttgaatattgatgtgtctatatgagatatagaggaattaggttttctgttccctttctttttttttcctttttttgataaaaaaattatcaatattaaatatagatatatattgaatataaagaggttattctggaatttattaaggaatgtatatgttaatatgaacaaaaatgtaatgcatgttagttcataggcaagcacagatatatatgtgaatatttaacatactttgtatctctttttcttttcctttatacagatgcatatatatatatattaccatattctcttagagaccatcttatatctggttactgtctccaaagagtcaggcaatgagttatcatgttttattcgtttctcaacaatacttaatggtatcttttttttagattcgctatcatcacgaccacagtaaatcgtttctcttgtcctttgatccataaatccgaagccatctacaacttctccaggaacataatctgacttagtcactcttgttgtaaggacattgttagttccttcatattgatcagataaaaattccttactcaattgcttaagaatactattcataacaaccttcagcatcaataaaataataaaactgataaatattatccagattagtcttattgatattgctaaactatttggtaactgttttaaaggcatcaagttcttagcaaaacgaaacataacaggacgtatcattacaatagacaatacgacataggctggtaatattaatcctaaccttttttcgaactgtgatataccaaccgcattgtctttacacattattaaatggaatttttcgtatatttccggtctgattctattaaacttagtgatatatgcatgtttcatccagtcaactattatttcacaacttacaatactcacaaatggactccaaattagtttcataatcttttgtgtcaaggacttgaaatgatggttatgtaatgctgtcttgattaatgtggatattgataaaacatcgttgctcatactattattaataatagcccctgtgttacgaataatgataataattaatattaacagtattttaaatctttgtacaatatcactaatggataattgaaataacccttctttatctgtttttttaaatacagaacttttaatctctgcaaattgtaatgataataataatgccaatagggaattattgtacgaattcactgcaacattcaaagatatcgactgatatatcaatatatagccatgtgctattaaatatattgcactaagagaaactagcaatatctgtttataccttttcattttataagtcttcacggattcatcagataaagttacatttaacaaagattgacccatactagctaacatcttatcacacatctctaatacattgaaaagcatataaagcttcatagtgttttgtcttttgattctatgatacacctttgatgtatcaagatggcttaacactagacatgcagtaatgataagacacaatgcgcaacgttgtttataggtttgtatcgatctaaatggtggatcttttttatatattgcaatgctttcaaatatatttattggcaagacagtaaagaaatataataaatcatttattgaagctagcaatgtgaaagtcatcaatttttccaaatgaaatggaatttttatcatatttatcaactgttctaattcataatttggatcagcgataatattaattttctcattcttagtgtgaatatcatttgtgtcagatgtggtttctatatttttatcttccagatattctcctttttccagttggtaatctattaattcataaagaattttttttaaccttgacctattttgcattagtggcttttgtgaccaacttttattcctaatttttgatttagattttttactgttcattaaattatttgacatattttttttaatgcttttggatttcattggataatttctatttgatgggtagttttttcataaacaggtagcgctaaaagtggtaaaacgtgctaatctacaagagctgtattgcttacagtattcccagtatttaatcaactcatattcaaatagtactttactagtttacctttattacaatacatttatatgactctgccaattgatgagtttagcctttcgatatttggaaaatctttgtttatcaaacatgaaattttaattctgaaaagagtagaaaagaaaacaaaagagaaaaagggaaggaatcacatctataattaaagttttctagtaacaagatgaatagttaaactaaatatatagaaactagttattgaatcaaatattcttccaggaatatctctaacatagagtcaacatattaatatagtcattttttaccattagtaatcatactgagcttgatagtagtgactccttcaattattataggtttattattggtctctccttcttttccctcttataaaaaacacatattttatattcaaagatgccagatattattaaatatgatataaaagatttacaagagactgttttaacaccatatcaaaaacataggcaattaagtatgaaagaagcacaatctataacgttagatatcctttcaatattgtgtgatggccaagttaaagatgaagatactttaaagtggttagcaaggttcatgacttccgatacgtattcagatttaatggatgaaagaaatcttaacaaattatgtggatatcctatgtgccatgcatctccagaaagagaaagagatccatttgagatgtctaaacttactaaacaatttttatgggaaaataatccttatgcttatttatctaggttttgtagtaaatatcatttccgttgttctcaattttatcaagttcaattatcagatgatgccttgttttcaaggactgggattcatttaataaataattctatgccaacaaatattattatgaatgaaaaatataatgttgaactcatggaagccatgctaaggaataaagccacggaagatgagtttaagaatatcatattaggtgtgaagaagttagaaatagatggacctgataaggttactaatgatactaatacaaacccaactccagaagatttaacgaaatggtttgaagattttaagatcattgaaaatgaaaaacctacaattatagatgattatttgaaagatcatagatgagttggatttgttgaaagaaaatgtactttgtcatgtatatacatatatgatgagtgaacactttataaattaattgtgaagatcgcttagaagaacaaaaataaagctattatggtaacattattagctattttattcctgattaatatttgaaataactattgtgaattgaagatacacggatctatttttttaaagttggtataatattaggtattgtgatatttttaaggttttaaaacgttaattcaaaaatatattcagggttttacctatttcacacttcagttaacggttccctttcactgtatgaatttgtattagttgagatatgaaaaaggaaagagaaaaaatattggagttataacaatgtaattgataaactatttattattggatcataattccattcattaacttcataagaaccctatgatttaattattattatagtattagattgtttagtatttcattttatatttttgtcttagttgtgaaagtattttctgtaaatgagaaaaatctttcagtttcatatttcataatgactggactaaaaacgtctagatgtgcgtcttggtaagaattatatagtgttttgtgtgttaataaggatcttatgagatataattgtgtacaagttttaattttaatgtaaacaatacactgacatttggagatcctccgccatgtgattttgctaattgaaacgttggagaactttttgttttggaagtattggtaagtgaattttaaattaatatggataaagatttaatcattatggcatgtatgatattagttctttttttttaaaaaaagaaagagtaaagtttgagtaaggaagtagaaaaataggaaacagtataattactagataaccatttaagaccattgatagatgaaaaacgagaagtcgtactgagttgagaattgtcaagggcattgagatgttcatttgctaataattttttagaatatacgtctgcataaataatatgatacgatttaagcatgttatggagaagctatgaattaaataagtttgaataagcaaattttcattttaatcaatcgtcataagagttttttaaaataatatgatagcaatggtattaactaaggaaacatgaagagattccaataatcaagtatttggttagatatattccttattaacagagttacaagtaataagaacaataaacgcttgaacgtgggtaatctagtataatatgcaacatttggaggtgatttgagttgtagtgattgcaaattgatactgacaacagtgctaaaaagataaaaccattctctcttaacattattaatgatatttgattaataactttattttctattttgtgtctatagtatatatatatatatatatatcatagaaaatcatcagtgtatcgtcaaattagtaaaaaattggattaataaaatagaagaggatatctaataatgtttatttagaaaaaattttttttctgttattaataaatataatatatctatttaagttagtaataaataaagtacaataattatacaagtaataaaaatcatatcgagaaaaagaaaaaagaaaagaaaagaaagaaagaaaaattaatccttggctaatgattctgtctcttcttttactgcctttgctaaatctggatgaacacgctcaaacattgcataagccctatttctaagttcaggcctagccccacataagcttacagaaatgttatgggccaaatgctgttgttgattatctggttgtttgcctaaaacatgatatagagcagtagcctggacaaaatctgaatcatcagtggttgtagtccaatgataaggaagtgcaggaccgttccaaacttcttgatgttgctgtataggtctatttggttgaatgaaattgtacttaacattagatgcatagtaatttggttcagaaccaaaattcccattaacattcataggaccgtctctaattaatggattgtggaaattggctgcaacaggacaattcactggaatttgattataattggggcctaatctgtatctatgagcatctgcataagcgaatagtctaccttgcaaaacagggtctgcactgggttcttggtatggcacagtattacttggtgcaaaagcagcctgttcgatttgagcaaaataattatctggattcttatttaaaatcaattttccaacccgtcttaatgggaattgggaatgtggccagacttttgtcaaatcaaatacagaaaatggtaacttttgtgcctgtttctctgtcatagtttgaatgtaaactgtccaagatgggtaatcacctttttcaatggattcatatagatcttgttggatataatctggattttcccctgctagctttacagcctcctcattagtcattgtttgaataccttggtcagttttcaaatgaacctggacataatgccattgaccttgtttgtttgaccatttataagtatggccagaatatccgttcatgtgtctgtatgaacgtggagtacctctatctgagaacaattgaataatttgatgaatagcgacttgattttctgggatggtgaagaaatcccaaactgcattgggatcctttaaattagttcttgggtttctcttttgagtgtggataaaagcagggaactttgatggatctctgatgaaaaaaattggagtattgttataaacccaatctaaattcccctctttggtatagaacttggtagagaaaccacgaggatcccttacggtatcagcagacccacgctcgccggcgactgtagaaaatctggttagacatggtgtttttttacctatggtatcaaacatttcagaaccacagatatctgtgatatcatcagtgacttcaaaataaccaaaggcaccggacccatgagcgtgtgggtttctttcaggtattctttcacgattgaaatgtgccaaactttcaattaagtttgaatcttgtaataataagggaccatgttgcccaattctttgagttgcaaaaggttcattaatgggtgccccgttagcactagtaaccgacaattgttgtgaagatatattggtagcgttagccatgaaagggcattggtgggtgttactgaagttttttggattattttcttgtgacattaataattgagtgaagtaaagagttaattataggttatttttttgtttttgatatttttgaaggttggtttgtatagttggattgtagagaaataaaaatggaaaattagctaaatgaatatacacaatatctcctatttatatatatttctgtgtatgaatacatgagtggaaatgtgaaaaaagtgtcattgtcaatagtagttgttaaagactttacttaatatatgttattagtaatattcttgaattgatgatatataatgagtccagaacatgtccaatgtttcagatctcttgacatcttcctagtatattagattcgtaaacaaaaaaaaataaaacgaaagatcaaataaacgaacaatggaaggaaaataagggaaaaaaaaaagaaaaagacagtagaaaaaccgaaaattgtcgaataataaattgtggaacaattccaaatattttcctcggcatctttatttccgcattaccaaatcttccgtccccttctctcctcttttttttctttccccgacagtttttttatttgatttcatgttacgtaatttgtacggtttgctgaataatagcataacactcggaaagaagattaaaaaaaaaaacagagttctcgatctcaaagatttctaagatttggaaagagatctaatcacaataataataaaagaaagtaagtaacaatcttaaatgactaacgtaaacagttttattggacttcttttgttctaaaaaaaagcttaacgataacattgcttggtattcttgcctaaggctagtctgacctataatctgcttggtaatctccaacatttgtcgcctccagatctcaatcataaacattgtctttaaaacgtattactaatagagatattagcattttgtatggaaattcttgtatacttgtatttttttttacatatattggtttctttttctttcactttgttaaaagttgtgattgttgggcccaaaaaagtgtgacttgggattatttttcttttaacatatatggggtgatcttaacaattgacttattaatattacttcaaaactcaaaaaaatgtatactaatattaatatagcctctttttaatagttaaataataaagaacataatattatgattagattcccttctgtatataccgctactaaattaaattattttgtgttattagatatgatcatagctaatgtattcaaatttaatatcactaggattaattatcatatttaaaaaaattatatagaatttcagttagagtaggtttctttatactaattgatgtgattcatgcattcacctgctacaactttttgagttttttattcaggtagttgatgaataatctttttttaaaaagaaaatttctgtcttttcttatttaattatagtgtattttccagttctattacacttcgacaaggtaaaatttcttttcgattcttctgcatttaaatcgccaaattgtttgttaatatacacattaaaatttatgaagatgttttatgttttgaatgcgtttattttgggaagccagttactccctttctaatcttagatacggttaaaatattaaaaaaaaattattatgttacttaagaatttctactatactttaatttaattttcttttcaaggatattaagatatttaagctttttaactgtatattgattttaaaatttgccatcattatcatcagcagttaccactgttgatgaattatttgctagtgaaaacaacaattgttacctttgaacaagatgctgttaaacaattatatctctttagggaaggagaaatctgacagattttgtgaatttctttatagaaaatttttgtaatgttttaggattattattgctgttgttgtccaaggaacgaaacaatgttctagtttagaaacttgcaaggtatagtggtatcttgaaatattatgataagaagaattaaacagtgagattagacaattgcgtaaatattatctttttatatacttcatacgtatcgactgcttacttttgttattaattatttttattctttttcaatgctacaaataagatttacttgttttaaagtaaaatcttcagaacgttatagagtattaaaaattgaggtataatatagtaaaagtcttttgtcctatttattgttgctggcaaatggacttatacagttaattgagtgctataataaaaaaaaaccttgttcaattcatgttgtagattttggtatatctgatatatgcttgtatggcactaccatacctccactgattaaaagataaaaaataactgaaaagtctttttgttttttttttttcatttttttaaacgaaataggtagttgttaaatcgaacagtgggtttaataggtaaaggtgaaaagggttttatcttctacgacttttgtttaaaaatcaacttttttgactatatcaatttttaattaaattactagtcctcttgtgttcgtctttaaatatttcactttgttgctcctttattattaactattaatcagtcagtaaacaaaataacgaacagggaatacttttactgaaagaataaatttataaagtacatagtcagttctgtctaagtcgtaattttgattgaagaataatatattagataatattttgaaagagaaataaaaagaaatcaagcaaaaaaaaatggtagaagaggaattagatactaattatgatgttatcgtcttaggtacagggattaccgaatgtattttatctgggttattatctgtagatggaaagaaagttttacatattgataaacaagatcactatggtggggaatcagcctcagtgacactatcgcaattatatcaaaaatttaaacaacatccaatctcaaaggaggaaagggaagctaaatttggcaaggatagagattggaatgttgatttaattccaaaattcttgatggcaaacggtgaattgactaatattttagttcatacagatgtaactagatacgttgattttaaacaagtatcagattcttatgtttttaaggggggcaaaatttataaagttccagcaaatgaaatggaggccatttcatcaccattaatgggaatttttgaaaaaagaagaatgaagaagtttttggaatgggtaagttcttacaaagaagatgacatttctacacatcaaggattagatttggataataatactatggatgaggtctactataagtttggacttgggaattccactaaggagtttattggtcatgctatggctttatggaccaacgatgattatatacaacaaccagcaagaccaagctttgaaagaattcttttatattgtcaaagtgtagctcgctatggtaaatctccatatttatatccaatgtatgggttaggtgaattaccacaagggtttgctcgtttgtccgcaatctatggtggtacttacatgttagatactccaatagatgaagtcgtatataaagaagatgggaaatttgacggtgttaagaccaaattaggtacattccatgcgccattggtaattgctgatccaacctatttcccaactaaatgtaaatcaaccggacaaaaggtgattagagcgatctgtgtgttaaatcatcctgtcccaggtacaaataatgcagattccttacaaattattattccacagagtcaagtaaatagaaaaaatgatatctatgtggctgttgtgtctgatgctcacaatgtttgttccaagggtcattatttggctattatttctacaatcatcgagacagacaagccacatattgaaattgagcctgcattcaaactattaggtacaattgaggaaaaatttatgggtattgcagagttatttgaaccaaaggaagatggatccaaggataatattttcttatcaagatcctatgatgcgtcatcccattttgaatctatgactgacgatgttaaagatatatacttcagagtcactggtcacccattagtcttgaagaaaagagaggatgcagaacaacaagaataagtaatataacgtgtctcctttctgtctttttcatctttcttttcttctcttaatatgttgttatttttgtcaaattctaaaatacacaataaccgatttttcccctttcgtatctatattattactattatgcgattttattgatatcttcatgtaaatgttatataattacatatatgattagatataataaaaaaaagtagcataaatctatggaccaaatagatagggatggaaatagatcaactttaatggaaaaaaatgcttttttcctcatgcaagttaatatccaatatatatatatatggatatatatgtatatgtgtgtgtagttatgtccttgcatatagatgttatccttttgtctgtctcccattcatttgaaatttcttgtagtttattttttttttttgtttgtttgtttgtttgtttttctatataggacaaattgattgataaaaggaacagcagaagatatatctgtaatataaagaaagaaagagatagaagcagataaagagggaaaaggtctagtaaatctcaaaaaatattatatttattttttatatttaaagacaagccaattacgtaggataagataagtagatacatagaagtttatacagacaaaccagaaagtaaaaaaataaattaaaataaaaaaagctttctttttttgaatgaattatgaatggcaataaagaactaggagatagattagatacaaatacataccttaatgtggactctatcaagattccagaagaatctctgataccagatgacataatagacacaatgccaaaccatcctgtaatcgagttaagagaacaggatagatggttaccgataaacaacgtggcaagattaatgaagaatactttaccctcgtctgcaaaagtgtcaaaagaggcgaaggagtgcatgcaagagtgtgtgagtgaatttatatcctttgtgactagtgaagcaagtgatagatgtgcagcagataaaagaaagacgattaatggagaagatattctgatatcattgcatgcattggggtttgagaattatgcagaagttttgaagatttatttagctaaatacagacagtatcaagctacccgaaatcaacaactatgtgaagacgagacaaaagaagagaatatgaaagttagtaataatagtagcggtagtagtaatagtaatggtgataatggcagtgctgaggccgttggtggtggaggtgctagttagtggtgacactaataataatatagtcatggtgaccaatacctggatacagtagatcaagcgtgaggataccatctgcctcacacactcaatattcagacaaattatcaagccaccgaacatctttagacatgtacatacacccatacatttttatatgcatattatatacgtaaattaatatattcactacatccgcacaccacactatgggatgttgatgcggggtgtctgaatgcaagtagaacccaccgatttgtttcgctttcaatagtccgccacacagtggggggatccagcatttaaatatttagaataccgcatacaaaatatgatacacaatatatgtgatagggtatcctaagagcagtcacagtatgttggataagactggtctgtgccaatgtgtgtatgtgtgtgtgtatgtgttgatatattttaaacaggtgttgttttgattatattattttaccatttgatattccctgtttttctttttcaattgctcttttattttattatttggagggtactaataccacaacaataacttggagatataattgatgttacgttttaaatcacccaatactttgctaaaggttcttagacaaccctttagcacacggttcataaatggtcaaagatctattcataaattagtggcagatgctatcacttataataataataataaagtccgttcaaatcatgctaggtttgcgtctacaattactaatgatacatatcttaataaattaatatcaaataatgaagaaattttacattggaaaagatatttagctcaaattaacaatcatgatcattatcacaatcataataataggagggaaaacagccttgtcgatgattataagtctcctttagataacattgtattggacaagtcttttgagatttatgatttaaaacaaatcactgatcttttgaataaaccaattattttgaaaaatgacacaagtaatattaacaagcatcataaagataaaaataacaataacaagattgagaacaaggatgaggatggaaatgaaaataggcctgaaaatgagcaagaaaaaaatatagagaaaagaaatgaaaaggtcttgaatgaatcaaagctaaatagttcttcctctataagttcctcatcttcttcctcctcacaaaactcaaatgacggtaatgataataacaactcttcgtcttccagtaataataataataataaaagtgataattcaagtataccagaaatctatccacagatgttggccttgcccatatcaagaagacctttatttccagggttctataaagcagtagtgatttcggatgaacgtgtaatgaaagctattcaagagatgttagatcgtcaacaaccatatgtaggtgcttttatgttgaaggattcagaaaacgatactgacgtcattgaaaatattggtgatgtctaccaggtgggtgttttggctcaaattacaagtgctttcccaagcaaagacgaaaagactggtaaagagacaatgactgcgttattgtatccgcatagaagaattaaactaaatgatttgacaccaccacaaattgatcaacaaaaattcgaaaaagaagaagaaatggaaaagaaagaagaagaagaagaactaacagaagaaaggaatgttgatgcacaaaaggttgaaaagaattccttgaaacaaaaacagacaagtaaaataccaaaactcgaagatattattgtagagaaagtgattgagcctcaacaaagctctaatgaatctttgaaaaagaccgattcaaatgctgacaaagaaaagcatatatctgatgggcaagaaattcttaaaaataaagaaactcaacttacaagacaagaagaagacgatgttgaaaatcctactggatttttgaaagattataacgtgtcattggtaaatgtctctaatttggaagatgagccctttgataggaaatcaccaatcattaatgcattaacttctgagattttgaaagtgttcaaggagatctcacaactgaatactatgtttagagaacagattgctacattttcagcttcaattcaatctgctactaccaatatatttgaagagcctgccagattagctgattttgcagcagctgtctctgctggtgaagaagaagaattgcaagatattctaagttcgttaaatattgagcatcgtttagaaaaatctttattggtattaaagaaggaattaatgaacgctgaattacaaaataaaatctctaaagatgttgaaacaaaaattcaaaaaagacaaagagaatattatttaatggaacaattgaaggggattaaaagagagttgggtatcgatgatggacgtgataaattaattgaaacttataaacaaagaatctctaaattgcaattacctgattccgtacagaaagtgtttgatgatgaagtaatgaaattatcaactttagaaacctctatgtctgaatttggtgtcattagaaactatctagattggttaacttctttaccttggggcattacctctaaggaaagatattctattaatactgctaagaaaattctagatgaagatcattatggtatgaaagatgttaagaatcgtatcttagaatttattgctgttgggaaattgttaggaaaagtagatggtaaaattatttgttttgtaggaccacctggtgttggaaagacatcaattggtaaatcaattgcccgttccttgagtcgtcaattttttagattttctgtaggtggtatgacagatgttgctgaaattaaaggccacagaagaacgtacattggtgcattgccgggtagaatcatccaagccttaaagaaatgtcaaactcaaaacccacttatattaattgatgaaattgataaaattggtcatggtagtgtacatggtgatccatcggcagctttattagaagtattagatcctgagcaaaatgggaactttttagataattaccttgatattccaatcgatttatcgaaagtgttattcgtttgtactgcaaatagccttgacacaattccaagacctttattagatcgtatggaagtcattgaattaacagggtatgtggccgaagaaaaagttaaaatagctgaacaatatttggcacctcaagccaaaaaagcagctgggttggagaatgctaatgttgaattaactgatgatgctgttttggctttaatgaagaattactgtagagaaagtggtgttagaaatttaaaaaagcatattgaaaagatttaccgtaaggcagcattgaatgtattgaaagagttgaaacttgaggaaaatggtcagaatctggaaactgccatggcgacgatgacaacagtatgtgatagcaactctatggatgggatagatagtaagaaaggtacacaaataatatcagagaaaatagataggacagggatgaacgatgaaattgaagtggaaaagactaaagataatgaaacttcaatgatagttcctccaaaaattaagataactattgatgcaaataatttgaaagattatgtaggtccaccaatttatactactgatagactttatgagactacacctcctggcgttgtaatgggcttagcgtggactaatatgggtagttgttctttgtatgttgaatcagtattagaacagcctttacataactgcaggcatccaacgttggaaagaactggtcaattaggtgatgtaatgaaggaatcatcccgtttagcatactcattctcgaagatgtttttggctaaacgtttccctgaaaacaggttctttgagaaagcttcaatccatctacattgtcctgaaggtgctactcccaaagatggtccatctgctggcataacaatggctacatcctttttgtctttggccttaaataagtcaatagaccctacagtggctatgacaggtgaattaactttaacgggaaaagtacttagaataggtggcctaagagaaaaggcagttgcagctaagcgttctggagccaagactattattttccctgcggataatatgagtgactgggaagaattaccatcaaatgtcaagaaaggattagaaccagtaccggctgattggtattcagatgtctttaaaagattattttcttccatctcaaaggaagatggaaataatgtatggcaatctgaatttaaaattatagatgaaaaagaaaaggaacatagcatttctgcataattatgcaatctaaatcatgttaactgctttattttgcctaatctatgtaatatttgtttgtcttttcattttgcttatttatttatcatttaaataacaatctattttttttttcaccatgatcattgtaaatagtaaacatataaattgataaatatttttaaaacaatatatatatacatatgtgtatgtggtatagaaaatagaataactcattattagctattttttgtgtctttcaaactcagaatatctttgctgattcatattaccataaactgaaaataggctattgacagttattacatgtcccttttaggaaaacagatgccctatttcgagatatcgaaaaaaaaaaatatttgaagatcaaaagctaacaaatcaaaagaaatgaattaacttatagaaaagagttgatttattttgtaaagaatgaataaagtttcgaaaaatctaattgagtaatctttgttgtactagtttatgaaacacaaaggattctttattgtattttttttgaagtcaatattactaagagttcgagaataaagaggattacttcttcttaatcaatacggcaaacattaaaaatttaaaaatgtctgaaaatagaagacgtagacgtgaaatcgatgatgacgttgattctgaaccagacttgccgccatcctcaccacaacaaacagctagaagtctgggtctaggtgcaaactcttctcctattggatctccctactatggtgatgaggatcaggataatgatatgattaaccctgaaggtgatgataacgaaattgatgatgaccctgatattgacgaagtagaagaacgaatgaatcaggttgatctgatagatgatgatatgtatagggattatgcacttgatccggaaaaagatagatatgatacaaatcaactagatgatactgcacaaagagaacttacattaggtgaacgtcgtcgtattgatgcacagttaaatgaaagagacagacttttaaaaaatgcagcatacatggaagatgaggaggaagatgaaatgaataatgaattagatgctatggggctaccggttcaaagaagaagacgcagaagacaatatgaagaatttgcacatagttatgatgatttattaagtgatatggaaattgatccattgacagaggaattaactcttgagtcgctaagtaatgtaaaagctaatagttattcagaatggattactcaaccgaatgtttccagaacaattgcaagagaattaaagtcttttcttttagaatatactgatgaaaccggaagatcggtgtatggtgcacgaattagaactttgggtgaaatgaattcggagtcattagaagttaactatagacatctggcagaatctaaggctattcttgctttatttttagctaaatgtccagaagaaatgttaaaaatttttgatttagttgctatggaggccactgaattgcattatcctgattatgccagaattcattccgaaattcatgttagaatatcagattttcctaccattcttaatctacgtgagttaagggaatctaaccttggttctttggtacgtgtaactggtgtagtaacaagaagaaccggcgttttcccacagttaaaatatgtaaaatttaattgtttgaaatgtggtactgtgttgggtccattcttccaagattctaatgaagagataaagatttcattctgcaccaattgtaaatcaaagggaccattttcaataaatggcgaaaaaactgtatatagaaattatcaaagaattacattgcaagaagctccaggaacagtccctgcaggtcgtttaccaaggcgtagagaggttattttattatcagagctggtggatgttgctaaaccaggcgaagaaatcgaagttacaggtatttacaagaataattatgatggtggattaaatgcaaaaaatgggtttcctgtttttgctactatcattgaggcaaattctgttaaaagaagggaaggtaatcttgcaaaccctgaagaagaaggtttggatgtatttagttggactgaacaagaagaaaaagaatttaaaaagctttctagagatcgtggtattattgataaaataatttcatctattgcaccatctatatatggtcatagagatattaaagttgctattgcatgttctttatttggtggtgttccaaaaaatgtgaatggaaaacattccatccgtggtgatattaatgtattactgttaggtgatccaggtacggcgaaatcgcaaatacttaaatatgtagaaaagactgctcatagagcagtttttgcaactggtcaaggtgcttctgctgtaggtttgacagcttctgtcagaaaagatccaatcaccaaagaatggacattagaaggtggtgcattggttttggcggacaaaggagtatgtttaattgacgaattcgataagatgaatgatcaagatcgtacttcaattcatgaagctatggaacaacagagtatttccatctcaaaagcaggtattgtgacaacattacaagcacgttgttctattattgcagcagccaatcctaatggtgggcgttataattccacattaccgttatcccaaaatgttaatttaacagaacctattttatctagatttgatatactatgtgtagtgagggatttagtagatgaggaagcagacgaaagattagctacattcgttgttgattctcatttcagatcacatccagataatgaagaaggggtagatgctccagaagaatctgtggatggtattgataatctcgatgatggtgaatatgtttccgtaagacaaaggaccttaaaaagacaaagaaaaaaagaagaagaaatatctcctattcctcaggagttgttaatgaaatatatacattatgctaggaccaaaatacatcctaagttacatcaaatggatatggataaggttagtaaggtgtacgctgatttaagaagagaaagtatatccacaggatcattcccaattacagtacgtcatttagaatctatattaagaattgccgaatctttcgctagaatgagactctcagaatttgtttcttcgtgggatttagatagggctattaaagttgttgttgattcttttgttgattctcaaaagattagtgtacgtcgtcaactacatagatcttttgccatttacactcttggccaaaactctaaaagctagtcttttgtactataacaatttattattatatatatatacttgattgtgataatagtttctagtaggtagatagaaacaaatgtatataagataattattagatgaccattttctgatcagaaaaaattgaaaaagttcagaagacaaatcaaaaagaaagtaccttatattagcatatatgatgttaatgttatttggcttttgaattatctgttacttattaatagttccatagaatcgatctaataatatatggatatttttcttcgaaaaccttatattaacagaagtaatattaatgtaatatggaagcattacgttttctttcagcatgatcgctttgaaaattcttataaaaatattgttgttaattgcttaatttgttttataaggtttaaattaatccgtcaatctataaaaagatttagctgtagtgacacttttcaaagtagaatctcacaaaagattttaaaaaaatgtatacttccaatgataattcttctaaaacaaatatatgatttatattatgataatgcattattatggaatcactaaaaagatttaaaaacttttttttaacaaaataaaaatttgataccagaataaatagcttgacgctattagattgaatgatagttgtatttgaagatgtcgtttaaaagttataatagttaggtcatctgtgtaatttctaactaggcctaacgttttatcataattgtcaataacagtttgataactttaatatggtttcagtgatttgttaataggtctaatgaattaaaaagcctcattcaaggtgtccaaaagaaattttgttatttttctttaaaagaagatatcatgagtttttggtatcttttaaaattgttaaaggggttgatatagtgcatatataaatcaatttttttatatttttttctgtctcagatataatattttcaaggaagagttatttaatctgaaaggttattttgtaccattatgtaaatcttaaagtaattgtgtagttttagagctgaatcttgtctatatatgtaggagatggtgataaacttataaaattcaaaaaggaaggatgttatggacacaaacttttgtctataattattagcaccagtggtctctaatattaagaatttgcgttgtttttggtaattttttcgggcatatgtaattgcaagtttgattaatttgaataatataataatcattaaggcaattaaatctctttattattaactattatggtaagtaaatataataaatggttctacttaactattttaatttttttatttacagaattcttttaattagtgactctaaatattatagataaattcttttgttaacattgtttaatttttgtctacccgcctttgttaataacaaattaacttagttgcttaaaataagtttcttatttattgttttttataataatttcacttgttttgtttttaaacttggttaccttttcataatatgtcttttacaacatttttagttaatgagttgctaaaattcaaccattttttatttcacgtttacattattttattagtttataatagtttatgataactttgaatgttctgctttggaccatttcaggcaatattaatcagtatctctaatagataaactattatcttgtagtaaaactgtttctttcatgttctattctattagcaaatactaataggtatcaaaatatatttatcaaaatatatttttgttctgttccctcatgaagtgttctttcatcttcagattttgatagctcaaataaattgaagaagtaccgtataatgaaggtagtgaaatggttgaaatagacaaaccaacaatcttttatatatcaaatatctgcagggaaatctctatagttcacaaatttaacaaatgattgtgcagggcctttgccaattattggtttggaagtctcagtattatttgtcaaagcagtagcatcttcactctcagaaccatcatcatagctttcacttgtattctctgttccctctgaatcactatccaattcagtagctgattcttccgaatccatagaatagaaatattcttctatccattgatccaccagtaaacctaatgtaattaaacttgtttcatcaaaacagttaattagatgtggatacctttgtatacacaattgggttaagaaataatgtaaaacttttaggtctatttggggtgctaaattgccggtatataatccctcttgtttatctatttctgatatttgttcaaaatcatttcttgatttaaaaggaataggtaatatatggttaattttctttgataataattcatctgctggcataatatgatttttggacactttgataatgctattacatgcatcatacacagtatacttattcaagttcgcgttagattgtttactcatagttgtttctaatgtttatccgttttggtgtatcaacaatattgtagattattagggaagtatatgtatagatgtatatgtatatcctgtgtctgtgggtgtaaaaaacttataattaaaagttgaaatgtttctatgctctgattccttttttttcactatcggatattggtttctttcagtaattagaatctatagaatcaaatttttggatgcaacggtattcatgagatagctttttctatggagatgaatggatatatattaatgactttccccagagtaaattaccacaagataaaaaataaaatattaattattttaatttcaatatttatttctctaagaaaagtaaataaaaacatatacataaaaattgaaggtaattttaaaatgagaaggacataaattgaaaacgagttataaaacagttttattgtgtgactatgttccagtgatattaagaaacttgatacctttcttacagtctcgcaacgcttttgatatctttaaacaatctaaacaccttataattaatcttggatcatttactagtacagcagtcctataaatggatttgatgatataatccactggtggaggtgagtttgcagctaacatactttctaaagttaatgaactccagtctttcgcaatagagttatccttatgtagttttgcagagttcagccctgtaaaaggatcattaacacttactttactgtatgatctttgggattttgatggactttgtaaggggttatttaccttcattaacggatcaatcgagtcgtcaaaatattcctcacctttcttgatctttcttttcattttcttcaatgaaagtatgccaacactggattctagattggccaaagattcatcacgaatgtcacggaagtatctcgcatcacgtaaagacgttcttgaagagttttctgtagattttccagaaattactgtatcgttttcgtttaaattttctaggatagacctttcagctaatttctcttcttttgtgtgactggaagcactaccattatcagtaataacatcactattgctgctgctactcgaactgcaagtatcatctggagttaaaatatctaatggatctatatggggtatagaaccctttttacgttttggttcgaaactgtaaccaccatttatggattctggtttattagaaagtttttttaacataatttttggtgaagtgtatagtaagtcatccccataatgggagatttgatcctcatcaggaccattaataccaatttctttactcaaactcgatttttttctgactttaggggattgaattattgtagattttcttggttcaaatggaacactaataaacccacttgacgagccaagtgaatttagactaggtctaggactggggtcatacatagtatgaaaaaagctatttaattgccctgtcatatcattcctccatgaggttattccatcaataccatccccatcactactgcttcctctactgctttcagaataggttcttgaagatctcgcgagggtatcaatttctataaatccatcatcaatcatttccaatgattctttaattttaattaaatctttatagtatgaacaattatttaaataatttgttattttgtctttattattttcaaaatgttcttcaacacgatctttgaatgatacttctgtagccttacaaattaaatacagacttttttctttttttccaattagaaaataaagtacttctgaaaccaagctgtaaagtagtggtatttcatatattttgctcattactagtatatcaagaacaactggtgcaaataaccacttactactaacttgacctgtataaaaaaattctgaaaaagcgcgaattgtaggagttggccatggcatatataaagaccgtggaatcattagtggctctaaatcaagaggcgacattggtatgtgactgctgatactatcagtgtttgaagttattgacaatcttgacatcccattaatcatagagttattcttagacaaatcataaaaggttgcgttgcttgtttttggtagagaataatttaatttttctttgtctagtgaattactttgaaaattagtttcgcttgaactttctaataactgtttatctaaagaattttgaacagtgtccactgatgatttcatgtctggaatgctataattatttaagtaagaaggtcttcttgatgacagtgggctttctttactagaaatttcataatcatataaagacgtatggttactagatattgatggagtgggcaagggctcgtttggagcttccatttgaggaggtagcgttactgatagaaaaccaggattttgcaattcatgaatactattttctctgctaccatttctactttttcccatcctatcagaagaagagctcacgaaggagatagaactcctagcactggatccagttttggagaataggtgctgcaaattttgcacgataggaatatcattttttccactgactgtaggatgtgatgcacgtctatgacgtaaatcaaaattccatgggtatgttattttacttttatctttgagtggcaaacccataagtgatgatcttctctttttattattatttgaattatttattttatcttggtataaatctcgtgcatttggtgagcttgttgttgtaatgttattttccttaaagggcactctaaacaccaacccaccagaagaactcgtggttgatgaggatacatgtgcctgtgttgaacttggattattcttataactacttctagtattgtttgaaacaatatttgaaaaattacctgtagttgcatgtggaggaatagattcatctccatcatcaattttaaatgaaatactcgaaaaccttctggaggagtctggttgtagaaactgtattttttgagacatcatattattattatgtgatggagtaatatcagacaataattctttatcctcatctaatgaatcggatcgtcttacagtggtattcggtagtgaattattttcaattttcccagtaacgacaggagttttgtacgatgaggtgttgctaaccccactaatactattttcggcatcttgtctagagagggagtgtgaaagggaactaatagaagaccaacgtctattgccactaaggtctgtagagccagctctagatgatctttgtgtatttttcagaagtgctgattgtaccccagattgctcgtaatctgcaataacattagaataacttttggccagcaataagtcgaaatatctaccccacctttttcttaataaatataatggaactccaagggtatctccttctgaagtgataaattcaaaatctgataaggatttaccaaaaatttcaagggaatctttacctaaaaccatggcataagaaggaaaggtagatctaatgttatttaagtcgacagaaggtgcaatgtaacgagtatatttttcaaactgagacatagagttctttctatcatttttttcactatctctaatctcttgtgctttttgttcatagctcgcagttaacttttgcttaaatatattgtttaaattatttggtgctactgaattggaaatatcattacctaaagctaaccatggtgtttctgataacgatggatagatattattaaaatcgtttatcattgataaactaaatgttaatatatgatcaaatttttggacactaggtaaataaccatcgttttttttagttcctaataaaaatgcttgatgatgagatttccagacaaaagtcctccaaaatctatgttcagcatgttgtgaatcaaggcatttgatcgatatattagtccatttccctgaaatagtgtcaaagttaaaacatttgaaactagatgcctttctgtctggataaaatccaccaattaatatattgtttccataattatctcctgttggagacttcagattaaatggttctaccaaatgttcctttttttgaagtccattgtatgtcattctcaccccctcagagttgggtattaatggtaatgcagtaataggagaaataatcctattaattttatctttttcatggataaggttaatattatcattgtcatctgatatatcatctctttttacttctttgtttgatatatctgttgtgttttgacaattgggtgtaaaaaatgctaaggttggaattatgcttttattattgtccattaaaatacaaaagtttctatcattggttaaacttatgggaaatgagtcaatatttgtctttaaggtcaaaggtttaggtggaattacatcattttgccaacaatttttagtaatattgtatacttctatagtgtcaattggttcatttagattggttaacccaccaacaataatcaatttgatgtctttggtatcagaagattcatttaccacatgcatagtatgattgaatcttcttgtaatgcttggatcatccgaaagtaaagtccatttagaaggttttggtccttttaaatctagtttccataattcattagaggcaactagctcataaccattttgtggtgatacaatcaaaccaccaaacatgtataaagcagagttaaaaaaacagattgaatgatataatctttcttttaagggacagagtaaaggatgacatttattgacttcagctgtaggcgtcgttattgttaaatgtgtattagattcaggatcattttccatggtaagttgggtggatttattaattgtagattgttcatcaatggtagttggaatatgtttccaagttctggaaatgagatctaagaaaaatagttctgaactcatatgttgattcaaattttggaatgagatgccatctttatttctttgtttagcaaaatacaggattaattccttctgtaatttcaaagtattaacctgatttaaatttaagggaattgttaatccgccatgtacataaatatttgatctagctatggttatagcagcacctgttctatattccaaccccagttttctttgtactacttcatcaaatgtggtagactcaccttttggagtataaacgacattaggtaatttcaaagaaaaacattctgcatcgcttggtttcaaaatagtcattactttagaagcagttcagtttagacggttatatttatgcacggatggtttatttaatagcaagtaaactattaaatatgtatagaatttattgtttttgatttaaccgatgttgaaagaaaagtattctatcctctaaattttttctttatatgattatatatgtatgtgtgtatttctaataaataacttaattaggttacctctactgctattagtaggaaggtttgacggaagatttcaggcataaaccctttcagatctgtttaaccatccatctttacgcttctgtataatttatatttttttttgttccttgtcaaaaaaaaaaaatagaagatttcagagtttcccttccctttgtttttgatcttacaaaaaaaataatataaaatagaaaaatgtatatatatttttgctttagctagaaatcattgtccctaagaaaatttaaataccctaagttaagaggaataataaaacagaataattgtatatataatatacagacctaatttatatgtttcattctgaatacctttttttttagcggggcatcttaattttaataaggtgtctttttgttatatatgtgtgttgcaacgtttcactaaataggtgatcataaataattccaaaatgtttgaccctcaatctgtttgatatgtttaaacattaactgttttgaatatatacatgttgaaaatatcagataagatgtgatgaaggaaggaaatatatgtagtataactttcctataggactttcttatgtatatctatcctatttgaaaaaattttatctatcttagcttacgaaaaacaattttatcattggcacaaatctgataaaagctgtacaggagtaatttacatttacagaaataataaaagtgttatcgtaatgcagttacttgctaattattttgtggaaggaacaagaaaggaagcaaataaaaaagacggtataattggcagttcagaaatggtagaaatatcagtgttttatatataatatttgtaccttattagttttgacaattttgttgtaactttaagatggggtaaaaaaaaggtagcagtaatggatctctcactcaagcctgggctgcttttaaaaaaaaaacaactagaaaaactagataaaaactattttgccctataaaagtatctgagttctagctttattgtaactttttttttttaaatttatgacaattttagccctaacatttttggttaaagagacagaaatattttttttgttttttataaaaagaaaaagatatctagtccgttttttttattgtttttcttataaaggaatagagtcttacttagatcatatataatgagaaatatgcttagtatgtagacattgttgactaagtaaattaatgttctttttttatatggagtaagggtacatatatatataaatcgaataaattagatgagaaaatataatcaaaaaaattataacactgttgcaatccatcctaatattaggtataatattcccaatgggaataattggacaaatcctttactttttgtgatgaatgcagtacatttaactgctgcaaagaccgtcccgactaatgtaattagttctatgaaagttaatgctctaactatcatgttttgagcggaatttgatgatatttttatgattattggaattaaaatttgtgacaataaagaatataaagctataagggagagaggataaccacataaagataagtatgaaatcaaggaaatctttctggttggttcaatcagtctcaaatgtaatcccattaagaatagcatagaccaacaaaataaaaatagagtggaaaagatagatttaccgtgtgatacacaaagagaataaaatatgataaataaaaggggtgtccacatatcacaacttgttgttaaactgttgatttcatcatctgtgatatttattcttaaaattggagtaaatgttaattttaatctttccataatatcgcgaatatcttttgataaagtttccattacagactcatctaatgttcctcttttgacaacggggctaacgtctgtaggtatgtaattgtcttcttgagtagtttccatgccagaagcagaaaatggatttgaataatctgatgtgacattattactcatgctagatgtacccttgttaccgccactaaacacatctggttcaatgaaatttgaatcgatattatccggcatttcgctatatttgctatttagtgataaacttgtgaaaattatctaacagatttaaagaaaatataaaaataaaatgattgtttgattagtccctcttgtatttattgtcttggtggctggttgataagtttattatattatcttttgtaattgttcttccagaggatcagaggctgatatattaaagcatagattttttttctaccttgctttcaatcatttttttgcattctttccttttttttctcgtctttcgactcttttttttttggacgtttttgaacaagtaaagagcaaaagagcatattattcctagaataccctaattgagctttttagaatatagtacacattttaatgttttttaaataaccctacttttaattaaccgtgttattattgtttttttttttccaaaaataatttttttaataatgtttctttctcttacaacaatattcataaattatttgaacgcgagataaaaaaaaaattcttttttttttctgtttcttgatgggaacataaaataaacaaactatatgttaagttattttatttgtatgtaaataccttttgccaacattaaatagcataaaaatattattttgtgatttagagagtacatcattcagaaatagttccacaaaaaaggtatctaaatcaaaaaaaaaagaaaaatgcagtggtctttatcacaacttatcttttccatctttctttttactattgtcaatgcccataatgttttactaccaccatatggtcgtcgttgtttctttgaagaattaaataaaggtgatgaattagccatttcttatcaatttggtaacagggatccacaacataacactcaattgactggtgactttattgtgttagggcctgaaagaaacgaaatattaaaaactgaaagggatgtgtctcacggtgatttctcaatgattattccatataaggggaaataccaatactgttttgttaatgaaaattcaggaattaacactaaggacgtaaccttcaatattcacggtgtggtttacgttgatccaaacgatattaatgctaacacccttgatggtgctgttagatccttaaataatttggttcatgctgttaaggcagaacaaagttatattgttattagagaaagaacacatagaaacactgctgaatctactaatgatcgtgttaaatggtggtctatattccaagttgtcgttgttattgccaactctcttttccaagtttactatttgaagagatttttcgaagttacttcgtatgtttgatttaattatatattattaaaaaagattttacatttatacagatagctaatatttatataaagtagctacatatatgtgtatttttaaacatactagatttttgtcttttattaaatactgtattttgttttttgcatagttttttaaataattgcaaagtctcatgttatatgtgtgaatatcaccatgaagaaaaataaaacaagttttatgtcacaaaatatctacattcatttaaaaaagtaaacataaagggtgttatcaatgtgtaattattaacctactttccctcactgacataatttttcatatattatgaatgctgtactaattgaattatgtttattcacccatacacttgaaagtctcgaaattcattgcaacacccatacatttttctattaataccaatagatcaaaaataaaatgccacttgccagaattgaactagcgacctttgcattacaagtgcaacgctctaccactaagctaaagaggcacccagtacatgggatgctacaggatagggaagttattaccatcaagattacataagatcctgaatgaatctagaactatttattgttttaataaaccatacacgtgctacaacattagatgctgtataataaaaagattagattacataagattttgacaaatctagaatttacctattgttttaataagttccacgtgtattactaattaccatgattagagaatgggggtacagttctaagtcactaatgtacctaaattaatgtaataaattttagggtttaaatcagtcaagtcattaatgtactaatctgaataatcgatcgagctccagaaaacacataaaaggacaacgttttctggagataaaagatcatcttccataaccatttcttgtaaataatttatatattatatatgaacaaaaatagaacaagcaagtaacaagccaagtaacttcgaataaatatattagctcgttaaagccgctcaatatataagaccgttttagtaattatattatcgactatagttgattattgtcttgattatttgaataactgttagtattatttgcgcttccttgaaatacacaaaagaatctgaccattttaatattacaacagggggttctgtataataaagttgttataaccatcaggattccatggtaatggtaaacatcattaagttatagatacttagagtattttgtactaaatacgtgtatatacttattatattgtatataaagtatacattcttgtatttacttcaagtctttttttaaagtttttcatttcttttcaaatctgtgaaaaacatatttggtagaaaataaaatgtcttcccgatattatggtatatccctgtaccataatatacagaaaaactaattaaaacaaattcttatggaaatgagagtttattactctcattttccaacataaatattagggtttggatcactagtttattaatatatcaagttaagtaattaatcgagttccagaaaacatataaaaggacaacgttttctgaagatgaaaactatcttctataaatccttttttatacataacttatatattagaggaataattcattttctataaagatgtttgttcattctggtatttttttatttcgtgaagcttgatatagtggcaaggattcttatgtgacaaaggcaatctttttacctgtatgttataatattttattccttttcaaaattagatttcaactgtccagctttgatctgaaaattaggaatttttagtaaaggttttttttgacataggcaaattacttttttttttaaaaaccttcatgttacaaatgttttgttttgaaaatagctgtcgcaacttccgcgaaatacaaagttttcaacaaatagttatcgttaaaaactttccaactaatttaaaccaagtaaacaaatattacaaaatataaaaaatcataattgaaaatcctgaaaggcataatctacaagtaatacttaatcataatgcaaagactttacaataactgaatatctgttctctgactgtatgtgttaatatttaaaagaatgttgaattaacattgataacacattacagagaaacatattcatgtaaacttcaattattgagagtgagagccagaaacatcagtattaattttcttatttcacctattaagttgtaactaaaatatatcaataatagtaggaagataaaaagagtcaagtaattgacgaatgtgtctaagattaacgcctgcacattttgtaagtctttatatagcattaatattcactttttgatatactacttgaaataattctttacaccaaaaattattgaagaaacccaacaaatatgtataatctcttaaccattaaactgttgtttatacttttactcactttttttattttcaatgagtagatgttgttaattctaaaacaagtaatcaatgccacttgaataaaatattttagaaatatggagaagaaccaacaagaatttacttaaaccttaacgcttagaatgatatacaatgaatatcgaaaataatatttaaactaagaacttacctttaaaaaacttttttaaaaaaagtaattttaactttcaagtaaaaaataagaacataaagaagataagtaatttgcttttaaaattacactagaacattaacctaaaaaaattatacaatataacccaaaaatctaaaaaaggaagatactgaaagaagtaactgagctagtgaggcatatccatttattcgtaatattttattaacaaagaccgtctctttgtcatataaaagtataaataataaaacaaatctatctgcagagtaatatggatttaaacagaacaaagaagggagaaaaacaataacaaatacaaaaatatttaagtaattactcattatttataatatttaacaatattacttaaagttgaattctcattttccaacctgtttatatcctgttctaaagctttaacagacaactcaaggttactagtttcacggaatctattttcagttctcttgactctttccttttcttttttacttacaaattcaattttgtatttctcataaagttcattattttgtgttacctccttctgtaattgatcatgctttaaatctaatttttcctttttggataataactgcttataatcgttctttaacttgttttccttattaattaacataatattctctttcttatactcttcttctactttgctaaattctaattcttttttcaagtgtgcatcctttttcttaatataaatttcttcaagatttatttcttcgttatctaatatcttgatttgatcttctaaagactttaatgttgattcattttgttgaatagtagttttcaaattttcaatcttaaatgcatttttttcatcattggtttcattttgttttatcttcgactttagataatcaatttcctgtcttaatgatgccaattttttgtttacttctttctttgtcttttttaacttagttttttcttcagttagattggcattagtggtcaagatagaatgcttaagagttaataacggggataaaaattttctatgataatatgatggaaaactaaaatctaatttttcaaattggtttgaagaagaccctagactatttgctacttcatatttatttgcctttagactcatggtcctaacaatcaaatcacatatcaagtaatcatccttgtgtcttaatctattaacaaattgaatatcatatgagcaagatggcactaaaccactaacgacgacatattcttcaccagaatgttccaaaattaaagcacatgatacttctgaccatattataccattgactaatacaatcaactctccatcagttaaattttcaatatgaaacgttaaactatgtgtaccaatatcgataatacaaaccttatattcattttctttattattaaatatattattgttgaacttaatcaaatttaattgatcataatcatcgaatttattctgtgcaatcaatgccattgagtttgaatcactaatattgaaaacactcttattaattgggtctgaagattttttattgatagaattcctactattaatatcaacactatcatgggtagcagagccttcattttttattgatctaagctgactattactattatctttatcatttgtcacaaagtttgtatctcttaagattttcttttcaaagtttgttgttctccatgtaacaaatatcgcccatagtggggaaataatgtattgtgcattttttttaaataaatagtgaataaaattttccaaatttgtagtaatattaatatcatctttcaaattattaataacattaacaggagaatccaaatcgacatttaactcatataattgattagtaaaattctgaatattgtcaacattatccattgatcttttcatatttgatccagctgatgccaatatagtagtattaggggactgcagttcattatctgatcgagtagttacagcaggctcaaatgatttaatacttttaactattttactaaaataaggtgacaatcctttcgaattaagtgaatgcgtagattgtatattgctattattgttattgtttgaagacatttgatttgaggaatgtgattgttgatagatggatacagaatctacagagttttgaacgtttagatttggtgaagaatctacgccaaaatttgccatgttctgattattttttaaaattcctttgtttacgtctaggtgcatagctagagaaggaaaatcatgtgatgtatggataatgaatgcttttctagaaaattgattcacaacaatataaaacgataaataataacggatgattctaatatatttaatatttagaaactcccagtttggtaaataatcaaattgccttgtcacaacttcaataaactttttaatataattaatatgaatgttgctattactattcaaataaaaaaatataaaacctgatattgaatttgtctttgataatgctaatagtatataaaatcttttcaatatatttacggatatagcatataacacagaacatgaagtggcaaatgatagacattcattggggtcattaattaaggatgaggcaattatagacactgccaaattttcaattggaatgataaaataatttccagcatacattcttgctagtgtagcgactaatatttcaattaacacagacattggagagagcttagaatgatgtgaacgataatgttttcgatcttgttgttttaatctcatattagggatgctattttgatgattaagttgataagcactatttaggttagagctaaaattattaccattaactgtattggctgtaggaacacgagctattttcttaccttgtacttgggaatgatgatggctgtgatgaggatgtgatttagatagatttagatactttggagaggcaaatgacgcttcctgttgattaggatatgaatctcgatgggtaatgtcatcaatagatggagatggacgcttaaataaacataaggtgataaaactattcgctatcacacgacgggttctggtagtcacaataaatatcattaacatacatagtgatgtgaaatgattaaaacttaaaaatacaataaataaggcaaatgtatcttcaaacctatgctgtcttatcaaagaaataggttgatgacctgacgatttatttttaatactatcggtattcatgtatagcctggtttaataaccccccactgcttcctaatggcttattaaataattgaacaaataaatggatacaattgcttatttttataaaacaaaaaaaaaaaacacaaaagaaaaacctatatataaatagtgtttgggtattccttattatacttatgtattggaacatttgttattaataaccaaaactgatgtgacagaaccaattagatataattataatcatattctttttttttcctttttttcttatttttttttttgtatttccattttcttctattattttttacagtttttctaattctctttgtatgaaattcattgatgacatatttagttagttttcttttctttttttgattattttcctttttggtttgttaaaatgataaatcgtatagtgtaaactgttcctattcatacaaattgccatatcctttctttatatttcaaaaaacgtcgctattagattatgaaatattattttagtagagtaatgctttagaaaatggtagggaaataaaaagtcaaagatatagaacaccaaatattaaaaaaaaaatttggtctcctatattagtataagttctataataaaaagtatatataaaccgtatgtagctatgaaatgcgcaaatatagaggaaagaaaaaagaataggtaaagaagaacgaaataagaataatataagtgttctaatccagttttcatttgagtaaacttaattaaaacttagataattccgaatcaaagtaagaaaaaatatatgtaaaaaaaaacttctagtaaatagtaagattatcttattgaatttttaccccactagtatattttcatatctagtttacatatacatatacatatacatatacatatacatatacatatatatattcctgtacatgctatggtattgtctatattatagtctagcttcttttcctaacaacattatttctagcaaacctttatctgcataacaaatatagtcgcctataccatatatatgtaagaaacttttaaaattagacatgactgctaggaaaaaaaataagaataaaaacaacaacagaacatataaaacacagtagaatcaagagaagttggatgatgaaattgtaatacggatataagtgcttcctgactaatgaggaaatatcttttattgtatcaatatagtgtactggacataaagcttttgagaaggaaatgaatctactattattttataaagaagaagataattaaatattgatgacggatacaagattagcactgaactgattcttagcataaataggtgaagttaaagatgaagatattgaattacagaaaataaaagaatactttagagatgctacagttgagtcatacttttctgtaatagtaacatttgtatcggaagaaagaaaaatgaaccattaacaatatctcacgctgtaggaaaaaatagagtgagataagttgactgttcaagaatgatgtgttgatcacgacaaatttacaacgttttcatatacacacacacatatatataccttgtttcgtatccaataacataatataaaacacggtttggaattatgtaaggatgcacatatttgtttctcttttttttttttttttccttctttttcttcttctacttattattattcctgtttattgttattgtggtttttttttaattatatataaaagaacagacgttagcgtctattacgtaatattattgtttttcattaccacctttttctctcccctctttctcctcccggtttcaatattacaaactccgttaatataataataataacgtaataataacataataataacgtttattcacggtccaagaactttgtctcttcgctttgttttgtttctgttttattctgctctatttttgtctcttcttttaatccaaccctataattttctaaacagaaagctagtagacctaagtctgaaaaagggggaaggggagaagaagaaatattttttatttttttttcttttgcagattctgccggtcgaatattttgagagaaaattaacggctgagcgttttgaggtaaaagaagaatgtgggtgtgtgggtgtgtggaaacagaggaaaacgaaaataaaaaaaaaagcggaaagtaaaaaaaaaaaaagcggaaagaaaaaaaaaaaaccaaaccaaaacaaaccaaaacctcttctttgcttccccctttttcaccccccattcaaaaaaacaaaaacctagatagaagaacaaaaaaaaaggaaaaaaaagagattcgaggtaagaaagaatatagacgtcgaaacacagattctctctcccttttctcttccatctttcccacttctccttgctttcagccttttcagcaacctctctttatcaactttctgaaacactttctcctcctccactcacctcatgtataatctttaaccccttttactaacgttcttgaagttctgtttatatatctattactacataacactcgtctttaactaaataaggataatattactcgagaaagactttcttctttctttctttttttaccttttccttaactataaatataaacacacataattaaataaataaatcaatacactaataaatatatcaatatatcaaaaaatcaacaagaaagttataatatgcacagaacttattcattgagaaattcaagggctccaaccgcatcccaattacaaaatcccccaccaccaccagctaccacccgtggtaaattctttggccgtggaggtattgcttatgcctttagacgtggtgcagctggtgtttttggtcctgaattagcccgtaaattgtctcaactagtcaaaatcgaaaaaaatgttctacgttctatggaaatcgtcgcaaatgaacgtcgtgatgccgctaaacaattatctctttggggtgtcgaaaacgatgatgatgtctctgatatcactgataagttaggtgtattaatctacgaaattagtgaattagatgaccaattcatcgatcgttatgaccaatatagattgactttaaaatctattagagacatcgaggcttctgtacaaccaagtcgtgacagaaaggacaaaatcactgataaaattgcatatttgaaatataaagatccactgtctccaaagatcgaaatcctagaacaagaactcgttcgtgctgaagctgagtgtcttgttgcagaagcacaattatctaacatcacaagatccaaactgagggcagctttcaattataatttcgattccatcattgaacattctgaaaaaattgcattaattgctggttacggtaaagctttattagaactgttagatgattctcccgtcacacctggtgaaacaagacctgcttatgatggatatgaagcatcaaaacaaattattattgatgctgaagctgcattgaatgaatggactttggattctgctcaagtcaagccaactctgtcatttagacaagaatacgaagactatgaaactgatgaatctgaagatgtcggtgatatcgtaaatgaagaaagtgaaatagcagatgaggaagctggtactgcgtggtctaatgaagaggaagaacaagaagtcgaacaagaaatagaacacgatgaaccacagaaggtagaagcacaataatagtaataaaagttcgtttttttattacaatttttattttgttttattttctttctttctttctatcctttttttttatttcaattaccatttgtcattttttctagttcgacattttatcttttgtatattcattgaattgaaagcaatgtaatccttatgtatgcgtatttatatgtaccatattaaatgtatcccaatattaatctttttttctactttttcttttttcttttttttttttttgaatatagaacttatttattttgtacttatatataattaattcttccctatattcatattaataatttctttgttttttgtcatttagatagatagatttaaaatttcagcgtttgtcgagattcgaacccgtgctccatatatatgtatatatgtatacacccgtacaaaaatgcagagtactggtagagaaaagaacaaaaagaaaaaataaaaatcttgtaaagaagcacaagaagtttgaaggtagtttcaaaaatagtcttagcttaaactttagtgggtaccaattattttttccttcttttcttctgtatcgttttctatttcttttttttttattattatttttattcgtatttagtcacgccaaccatcaatatcccttataattattattattattattattattattattattactttctgtattttttcttttttaccttctagatcgtggatatgattacaacaagatcaattacaactaatataatcaaaatatggcgttctcaatgctcttcatggatcagatttcaatctacctccacttcaagtagctcagtgaaatcccaactagatgaatatttgacatactataatacaaagaaagagttgagaccatatatatatagacccaagaaccataacaaattgttaaccatgtctatcccaataaaagatgattatggaaacattatcgatcatgcaactcccgaacctaaagatccgattagacccatttctccaaaactattaacagaatatatcgattctgttgaggataaaaaagaattgtttaaatggatcaaaaaatggactgatgtcactcctcgaaaaaaggatgtttggaagctttggaaaccaaaacacttacaaaaattgctgatcaaatcgctaactgagcttggtgaatattcaaacgtgcttgggtttatttattcacagaagaataaattcgttcaagccaagaatggccaggttttcaatgtagaaaattttttcaataccgtacttttatgcacaatattaagaaataatttgattaaatctcctaactctacaatagctctgaagaaattgaaaacagcttggtcaattacacaattaaaagaaaataaaactgggttatccaacatattagtccaaagtctggaacagattcaaaattttaacgtttcaaatgaactaaacggatttgaaaataaaaatctagttctaccaaacttatcaaacttagatttgaagcatgttgcatcaaatagaaataaaattatacaagataatgaattaatttattttatctcaagagctttattggaacgtgcaaaccttaaacagattgttcttcctccagatattttaacatccttgcaagaatttattatgaactttagacaattattgcctgataaggaagataaatatgataaaatgatgaaatctatgaatgaattatataaaagcaaataactgatattttaacttaacctcatttttagttgttactcagttaataaatttacatatatctactcatatagggtttagatcttgtacataaaaaatattctaattctaaccatccttctaactatgtagatttttaaccagcaccttgtcaacctattcagcagctagtgtaaagaaaggatagaaaaatttgttcttttcggatcctatagattattactatttgtttgattcgtatatcacgccctatattttttttttatcgatggcataaagaaattattttttttccatttctttttttcccaattgatgataaatgaaagtaaaaacctatacttattagaagaagattaacaagcagcattgacatctatagtgtatgatcaatacagtttctacagtatcctgtgaagaattatccttcaacgtaaacctatttcagtactacacaatcaaggaaaaggcataaggggaaatatcaataattgtttagtcatttatttgttttcttttttttttttttttgatatcctgcatcattaaagaatgagtgaaaataataccgaatcaaagacttcttcagtaactactgcttccctagcatctgctactactggtgaaagaaaattaactaataaagaattaaaagaacttaaaaaacaagaaaaggctgccaagagggctgccaaaaaacaagctaatggtatatctctggaacaacagcaacagcaagcacaagccaagagggaaaagaaaaaacagcagcagcaactgcaacaacaacgtgaattgaaaaagaaggaagccaattccaaaaagaacaaccgtgaggatggaaactctgtaaaaaaaacttcattgtttagtcatcttgaaactactgaagaaagaagagcaagcatcttggcgattacttctgcagtaactaacccaagaacttctagaatcactgctgctgggctaatgattccaatggttgctagtgcattatctggttctagagtatatactacatcctcatttgctaaatcaatgtctgcaccctcttcaaagaatattaaagctaataatggtggtgattcattgtctccctcacttactgggtctggcgttcaaaaaaccgttaataatactttagagagtggaataactgccaagatatctgggacggatgcctctataacagcccaaggtagtacatctaatattcaaacaaatgacatttccaatactatggatattgctaaatctttagccacaatgtccttaaactcagatgaatattctgtagttcccggtatatcctcaattgttccacatataatggagcaaagttttgagtcacaacaattaatatcttctttgaaagaattattgttgaataaagattatatacatcctgctgttgcattattgacaaccaatattgcacactataaaattgttggttcaattccacgttgtattgccatgttagaagcattccaaatagttattagtgattatcaaactccaaaaggtactactttatcacgtaatttaaccaactatttatctcatcaaattgatatattgaaaaaggcaagaccattgagtgttacaatgggtaatgcaattagatggttaaaacaagaaatttcacatattgatccatcaatatctgatagagttgcaaagaaggatctatgtgaaaagatcgctcaatttgccaaagagaaaattgaactagcagatcaattaattattgaaaatgcttcacaacatattgaggaatctactactattgttgtgtatggttcttcaaaagttattacagatattatcatacacaatgctgttactttaaagaaaaaaaacattaaagttattgttgttgattcaagaccgttatttgaaggtagaaacatggctaatactttaagaagaaaaggtataaatgtcgtttatgcattaattacaagtttagatgctgtattcaacatgaatgtagattatgttttccttggagcacactctatcttatctaatgggttcctttattccagagttggtaccgcaatgattgcaatgagtgcaaagagaagaaatatcccagtattagtctgttgtgaaagtttgaaattttctcaaagagttcaattggacagtgtcacatacaatgaattggctgatccaaatgacctaataccaattgactataaaaatcctgttgaaagatttgctaatgaaggcactttgttgaagaatttcattaaagagcgtaaagaatacaaacaaaaacaagaggaaatcaataataaaacaaagggtaaagttgcgaacagaaataataataataataataacaatcaaaatgataataaaaagagtgataacggtaaagattttaataacaattatgactctgaaaatacaaacgtacttgatggctggcagaacttgaaatcattaaacattgtcaatatattatatgatttgaccccaccagaatatatcaagaaggttatcactgaatttggttcattgcctccatcctctgttccagttatcttaagagaatataagggttctgcgtaatttaactgcataataagttgtaaaataaaaagaaaaaaaatttaataaaaatgagatcaattaataagaaatataattaattttatatagaaaagaaatggataaatgaacctgtattatatacatgtatacataactataaccataattactattataatcattttttggcattcaaaaagaaacatgttcaaaatattaaagctgatataacatgaattgtctatcattgaattataataataatgcacaatcgtacttttttcaccaggcataacagtaaaactcgagatataaaggttgcaaataaaataaaaatatgatagatatacataaatataatatatatacactatttacaagtaattataaccaattttattcaatatcgtctatgtcctcaggtttaggttcacgaaccaatttaccatttttgaaaaaggatgtcatattttgtggaggtaattgttctagcatcaatactaaatctttatatatttgtgctggaatagttctttcgtaaatattcaacaaatcaccaggtcttgggtatatagttagtgctttataaaatttaactgctgaatttaattcttcacctggtatatttgccaaactttctccctcaccaacatacttcataaacatagcttgcacattttctgaactaatattgcttggaggatctttaaccaattcattagttaaaaatcttacaatttcatcttgcttagctcttttaaaagcatcagtcttggctttgatatccttttggtgcttcttagatcttcttttcaattgttttctaaattcaggatctgttcttctttgataatcaaaataagcaatatagctaaataaagcacaagcagcagctacaccagttaacacagccccacgaggcatcacagttggaaaagacatcttgaacgtacagtgttatatgaaaaggggtttatttgtatgacgactattctaattattagctttataaatatcaagttattcacaagacaccaatgggaaaactaatgttaatactcaaaagcattcattgataagaaacaggttaatcatactggacttatctatgctagcaggttttatttagactttagtcaggttatgcttcacctacttgtctgtgccactttcgggttccccagattattattgattaaaatttctggattaattccaaataaaaaaaaaaaaaaaaaaaaaaaaccataaaatttttttgaaaacaagaaagttcgtataacatgattaaaagtgtattgtttttgtgtttaagtatttgcagatcgttttattgtgttttatgtaagatggttcattgtgtacaccaataagtattcttcataaatatgccattttaaattcaattatagaaacaaaagcacttttaaaacaagaagaatttataatgttttttatatatatctttggttcaatgtcataagaaaagcggttccaagtttgggttttcaatattaaaagttatatgtggttatttaaccaactgaaatttttttttctagaaaagttatgatcccaattatcattatatatttgtgaaagtgttaaataatttctaactaatatggatgctgtcttctacgatccttttttgtatcgcggtcaaaaaaattgagatcttttaaaatttcattttaatatctttttaaataagcatcaaaaattaattaatccagtatctaccattattttcttcaaaaccaaaaaaaaactaataacaagctactaaatgaatctaataatggatcaaacattagatatcacagttcactatacagaaagtaatgcgacaaatatcatctttcttacttgccaagatgacaaagaatcaccaccattcaaatatgaaaaaatttagtaacattttagagacatctactgaattatccatataatatcaagaaaggtcattgaattcaacatattaaacacaatttccaagtagctgaagatttacacgaaaaattatagaaaagaaaagataaaagtaatttagtctatgatattttgattattattctattattgatctaaaaaaatgtaaataataacaaaaattaatccaattcataacaaactacttttggaatatcttacaaccaatagttaatttacaaaatatttctaaagagtctaaaaattttaaaaatgaacctaacaatctatccaatatggctgatattgcaaaatcttcaaataatggttctgaatctagaaaactcagtgaaagtaatgtaaaaaatttaaattagttaaattcaattatttaagaaaatgaagagacttgcaacacattcatttttttgtaatccaaaaccatattgatgaattactattaggtggtatgctatgcagtaattgggcaatggatatgtgtaatcgaaacaatctatctcctgaaatataaattaacttttgctgactgcattcaatatcaggaatactgtggaaaaactgtaaaaaacatccaattgcagaactacttttgataaagtaacttatgttgacccatttgtatgaatgactggttttttatgggaattattgcagattttcttattaatgtgttataatatagtggaaagaaagtttgtttatttaagaattttatttttggtgaatctaaaaaaaatttttactgatcaaaaaatccacatttattttttttgttgttttttttttttttttgaactccaattttttctcccctctacactgactgataatagaagctcatcgcaactattgaaaagaaaaaaaataaaaagagtaagagaaagagactttgggattagctgttatttgaaagttaattgctttaaatcagatccattaaaaaaaataaaaaaaaaaaacgaaaacagctcaacaagcaaataaacatataaaactagctgtgaagcaaacaatactaataatggttgctaagaaaagaaatacattaagaggaaaggtagcagcaaggctgggctctaaacctttagatatatctacaataactcctacggtagatgatgaattatctgaggatcctaaggctttcttacaccaatataaagaatccaagaaagagaaacaaatgaataaacaaagtgcttttatatcaaagattaaacaatcatcaaaaaatgaattttcaggtatatctaagtcatcaataagacgtagaaagagaaaacttagagataatttaaaaccaagaatggaggatttattaacttctttaaagcaagaacttgatttaaaagaatttactacagagtctccaaataaagaagacatcatgacagatgaatcaaccatttctttattagcttctaatagacctagtagtgttactcgtattgttgattccaaaaaaccactagaacctggatccattaagataaaaaaaaatgaacctaatattagaaacaaaaaaggcgctagagccttgtctattaaagaatccaagagatttattcaagtattaaaaactgacgagtttaaaaaaaattcttttgctgcattaagagatattattaaattgcaaaaacattgattatatatatatatatgtgtgtgtgtgtgtgtaaaatatagaataaaatggcatttcaaagggaaataatataacataattaaagcagttaattaacatagttaaattaaatctcgttgaaaatcattacagttataactatcacaatattaaatattcattttataacaactctgctaaatttagctatacaaatacaaatatcaaatgttaagtatctatcatctagttaatcggtttacaacataaaataaacattaaaaagcactgttattaatcaacatgtatgcattaatgcctttaaatatatataaaggatagttgcatccatatgttacttttgtaaataaatatattctgatttttcatattcctcctttaaaaaatttgtttttcagtttttttttatgatactataagcatccattgatcacactatatgctataataataatctaataaagacaatcttataacaatgcaattttgactaaaagaacacagtgaatatattatttatttcttctaaaaaataaaatttctattcatctatattaaatgatatttaaaattttctagtttcatgggcatgacagctctccttaaattataagtgcttattatatttgttggaaaatgaaactttattactgtcatttccattataattattcttaattagtttttctgtatactatgctgtatgtgaatatactgaaaaataaagaaaacattttatttttcacttaatgtgtcttttagatattcgagggaatgaaaaattttaaaaaaagagttcgtgtaaataaaagagttaatagtgtatacactatacaacaaatatatacatgtatttcatacaaaaataaaataagcatctataacttaatgatatctgccattatttaccacctattttgtacagcttgttcacatatctctgttactatgccactataacatattatgtttatctacggtgtgttcacatacttgtgcaattgtgccatcataacgtattgtcctaaatgttctatgatcttcgattatattattgtaactaataataaagatatggattactaattcattaatatatcaagttgaataattgatcgagttccagaaaacatataaaagggcaacgttttctgtagatggaactatcttctgttactcctctcttacacgtaatttaaatatattatatataaaaggaacaaccaacaaacaaccaccgaacatcgaatgcagaatacaataagcaaatagtataattatataagctcgatatagccgttaatatataagactgtattaataattgcatcaccgattgtatcaattattatctcgattattaatagattatccgtttgatatttctagcgcttccccgaataatattaatagtcattcaagtaatcgagacagtaatcaattataggcgataatataattactaaaacggtcttatatattgagcggcttatatcgagctaatatatttattcaaagttacttaacttgttacttgcttgttgttctctttttgttcatctataatatataaattatttacaagaaacggttatggaagatgatctgttatctccagaaaacgttatccttttatgtgttttctggagctcgatcgattattcagattagtacattaatgatctgactgatttaaaccctaaaatgtattacattaatttaggtacattagtgacttagaactgtacccccattctctaatcatggtaattagtaatcacgtgggacttattaaaacaataggtaaattctagatttgtcaaaattttatgtaatccaatctttttattatgcagcatctaatgttgtagcacgtgtatggcttattaatacaataattaattctagattcattcaggatcttatgtaatcttgatgattataactattctattcacacgctgttgtagtatggtgcggtgaagttctttgtgtattccagggaagcgcaaataagattgatagttatttaaataatcgagacagtaatcaactatagtcgatagtataattactaaaacggtcttatatattaagcggcttatatcgagctaatgtacttattcgaagttacttgacttgttacttgcttgttctattttgtttatacataatatataaattatttacaagaaacgattatggaagatgatcttttatctcctgaaagcgttgtccttttatatgttttctggagctcgatcgattattcagattactacattaatgacttgactgatttaaaccctaaaatttattacattaatttaggtacattagtgacttagaactgcatcccaattctctaatcatggtgattagtaatacacgtgggacttaataaaacaataggtaaattctagatttgccaagatcttatgtaatccaatcttttattatgcagcatctaatgttgtagcacatgtatggcttattaatacactaattggttctagattcattcaggatcttatgtaatcttgatggttataactattctattccacaacacacgcaacagtcgtatggtttcgtggtctagtcggttatggcatctgcttaacacgcagaacgtccccagttcgatcctgggcgaaatcattttttaaaaatttggtttaaaatatcatgtgatacgaagtctttacaagatgtaatggataaaaatcctattactaaagatatactcttctaaaaactaaaatagataaacgtagctttatttgttgtctctatacaatatataaattatactctacataaaaagtaaactaacatacacagatatacggataaacatagtaatataaacaagagaagcaagaacattatcgccaagttaagagttcacaagattgtttatagtgatatccagattccgtatgtcacaatctatgcttaataatagtaattaacttaaatggatatgaggtatagacttactttatattctcaaatgtaatatatatatatatatatatagtttaatggaacagggactacgtacactatactgacttatccattcctccttattcttttttatcttcttttaatcctttatttgttacttctgctttgcttatttgtgccctttcttcgcaatttcttcattccaattattaaagtttgcttataatacttacaaagtagagagtttagggaaaaatcattaaccttcatttttttaaattactagtcaaaatcttgacacattaatatttgggatactaaagatacacagtatgaaagataagaatcccctaaaagagatatactctataaaagagttagatatgctaaataaagcttgattgcaccttcaatatctaagatatgtactacattctatataagaagtgatctaaataaacaaatatacaggtaaataaaatgtccatgcacaaaaaaaaaagaaggtcatcaccaaggagagagcttgaaaggccagttacagctacagcgttgtagtatatgtcacaaaataaaatcttcttctaactattacgacataattacttattttaagagaaattaaatcctatatatatatatacttaatttacaatcatcattcatcatcaatactatctaacacctttagataatagtgttatattggaaataagccattgacttaaattctttttcttcttcctggaccctttggcctattgaatttttttactgtagagtcatggtgtacttctttatctaaatcttcttgtgtaagcgtagatattaatgaaatttccaattcatccggttcaccaatctctattactctagcaatggataatccttgttcctctcttaaatatttcaagaacccacttctgttagacgcatacaacatacgatctttaaccttactacctgatggacaagcataaataaaataaataagatttccattcttataaagagtgtatgttgggtgttcagtgttaattacaatatctgttggagttgaaatgtttttctttgaatcaattttaacattttcgttgatactgtcaatcttaaatgaaattaaattagttccttccaattgttcaattaatgatcctccttctacatcaacttcaaactttaattgagttgacaccccgttagtttgagatactagttgatggccaccagccgattgtaattgcatctggcgttgttgttgattaatttgtaattcaattttttcatgctcagttaacaaagcattttcattaattttagtttccttgattgtgtcagtaatatcattaaaatctgtagctaaaatctgttgatctaaaatattactaccaacttctcttaataaagtattcttagtcgatgcataaatcatcttagatcttattgaagaattatccggcacgaacgaaacaaaattatagtgttttgtatctttttgaaaatttttaataaatatgtataatggctcatcccccaaattttgtttcaattgttctaacaaagtaaattgagttgagaatttaaccagattcgagtcctgagatatcttagctacaacaatcaaatattgactatcattttgttgttttgaattatttaaaatatctagcaattcttgatcagcagtaatacctgattgatttgacatttcttactatggtaaacttattataattgaattgaggaatcaaaatgctgaaatctatatgtgttttcttttactatatactacccctcctttcttttaagaagcatcatagcaactcaacttcctttttaatatttcattatttttctcgatcatattttttccattctgtttcaagaaatattgtaataacgaacaaatttagcaaacacaggcactaccaagccttagagaaaatcaaagaaatgacgcaatataaaactaaaatttcaacgcattaatatacaaatatacaatcaatattaaaactatacatgaaacatcgatttatattagtagatatacacatagaaggtcaaaaataaacgagaatgtaaatatatggatatatgttctttccttttttctttttttcttctctttttttattgaaattctgacatactgccattaattcccctagtacctaatgataacaaaacagaaggaataaattagatcaacaaaaaaaataaaatactacaaaaaatgaacaagactcttttcactaaaaatttaccaaagtgtccagaaaattacataaaaaaagggagcacatgaatagtaggtctacaacatgaattcattcatttcaagacctgttgaaatcatttcacgaaacccactttttcttctgatagctttttgcaataataacttcttcttattaatccttctacctcctaccaaaccagttggatcatttgagataaaattagttgtattacaattatttttaagttgatttgttgtttttagggaaaagttaccgtcagcatctctataacataataatttaatattatattgaggtagataagtattcattgtgctagaataattactaccaccagtaccacatgtagtcaaatactcatctaacaaaaaattttctattgacgaactacctatattatatgacaccacaggtgttttcttgtttgtatttatattatcattattatagcaatcaacattaattggaataaaatcttcgttggtacccttaacctctttccaaaaatcctcatccttaatttcttcaaacaactgcaaagataaaccaagtgtataagaatctgaatttgttatatcaacagttgctgatgttgatattgaacttgcctgtttctcttgaaatttctttaacgggaagaaatgatcgtttttaccataaaacatatcatcattataagtttcctcttcaaaaaagtcatccctatcaaatgcatcataatatggcaaaaatatcatatctgaatctcgactttgcatagtttctacatcagaacaatttgattcacttgatgggatactatctataataacagatttaattggttttagaacttttgtgccacaatttccttttacattcataccttctatattagagtcctgtatccgattttgataagataatttactcgaaccttttcctcttgttaatactgtaatgtcattttttgttattattttatgagcaaataaagaaggtctacttgaagagttattcttatctttagcattattagttttagatatagtcttattacctaacgtattattggagtcaatatgcatttcctttttttttttattttttctcaaatatgtagtggaaaaatataaaaaatcacttgaggtataaaatagcttgataaacaacacatacacgtttattatatgtatcttctttgattacgaaaaagggttcgaacctgaaaaaaaaatctatagaagtgagcagaatatgttgaattataaaattttttttatttgaacaaacaaacaaagttaaatatttacatgtatatatatttgtatattctttttctttaacttttccatgcacatcacgacaacgtactacttaatacccttttctttctaagtattgaccgaaatattgataaaataaaaacaaaaaaaaaattggtagtctcatcgattgaagaaaaaaaaaggaaatataaaaaggaaagttaaaacaattgttaaacatgcctattgtgcccctatattgttatttgccaatatttcctcgaagaaatataaaaaaaagtttcattcaaactaataataattttttctttttttttttctttttttcaatttttttgttttgtttcacaaaaaaaccgaaaaattaaaaaaaagaaacgatgcaattttaaatgaaaaaaagtttaaatttatgtggagaaggcaaatcttaggaatattgttttatataattaatttaagcataacaatttgacttttatcaagtaaattaacttcgttgaactatttaaacaatatttgagacagaaatacgtaactaaaaaattcatcccttatctattcacaatctcaaataactcacaacataccttatacaaatattatgtagtgtattcatacacaactttgtctaattttactcttttgcaatcaaatgagtggtcctttgtgcatgtatttatatcaacttttgttttatttagtatatgtctaccaaaacgctaaccaaccaatatacattgctgccaaattatcaaaagaagtagcctcttgaatcaatgtttcaacctggcctggaacactaaggaccaatccatcacgaggatctataccacgtactttatttcttagaatttttaatgagtgatgcagtgaagtgtctgagcttctatcatacataattgtttcaataacatttactaaagacacctcatttcttctcatcaaggataaagtcacttcactggattttttgaacgtaccttctgtaccaataataccaaaagcatctgtgatattctgagtcaatctaaatggaacaacttcaggtactggtaattgtttacctttctcaaataaacaatcaaaatcaacatgaagaatatttcctaattctacatctaataatatgttttcacaatgacgatcgcccaatcccaatatatgacctaccatagccattactgcatacgatcttgtgtacctatttcttgcattaaaccattttatcggatcagggaaggtttctagaaaccatttatataattggggaacaaactttgaaacttgtttttggaagaattgtcttctttctacatcctgcaaatctttccattctgcgtacattttcccaagactgtagttgaattttgatctatcgtatttattaactaaaatcgatcttaatgtgacaacattaggaacaatctctaataaaccacagtcttctcttaaagaaaggacagaatatgttaaaatatgcaattttctttttgcagattccacatctttgcttaacaagaaatccatcgtagtagcaaattgcatgtattgattatcttggcgaacatcttccatcttacacataataccatatatctgcccatctgatccaatgatatttatttgtttaggcttttttaaagatgaaaacaccttatacttatcagagaagctttcaatactaacaagagatctaaatgttttataagtatttttcatttcagtcgacaaagtaggtgacaacatctctaaattaatccgaacaggaacggctaataatgttggtgcaatatctaacttaaattcaaaatcaccttgaagactttttgaagtattctttatatccttaatatcggttacacaaacttttgtaaattcagtagtcaataagttcgcagatgtcattaactttgcatgatttgtcttggataaaagtttttttgcaatatcatcaccaatacgtcttcttcttgtattcgacgagttcattaatgcagcaacataccaaaatatatgttctggaaaatcaatggctaatttcaataggatttctctaatcaatttagcagattgtggaaatgggtgcaataaacgagataacaattgagttaatacagaataccacatataattaggacacgtttgaaaagaattattaacggcattgcagatttctagtgcagtagaattttgtacagaagcagtagtattaattttggtattattgctaattgcaagggatgtaatatctagccaaaacgtaaccacttttggtaaattttccctaactttgcaaatattacgttcaaaagccatcaagaaaaaggatatagcctgatattcaaaataacctgttgttatgtaaccctcttctttttttctttctaacaaacgactataatacaagcccatagaataataaggcttatcccattctggatccaatttgaaaatttctttatattgttcaataatttttgatgaagatgaattattagataaatccagccattcagtatatttcaataacacagtggctgcatttcttgcatttatattagaattatttttatatcgctggtgaatttccctcactaatttcaatgcaccatcgttctcaccctttttccataaaatttctgcaaattcaagctctgcttgaagatggccaaatgataagcagttcattaatgaatcagtagcaatatctaatcttgaatttgcacgagccatctgagctattttaaaatatgtatcaccaagatccttttctgtatactctgtatgccttaataaatcataagatttccttagagccattaaataatagtttgatttgaaatcagcaccaacacgctttaacctaaaatcgattacattacatttagaactaaattgatatgtatcaacttctgaagaaagaagcaatatatcgtacaaaccatgtaatttcatcaaaatattttgttgtttaacaagagcagcggaattagcgagcgttgtaaaatatgttccagcaagtttaaaacaattattaacatagaattgtaacttttcaacatctctgctatgaatacaatacaaagcttttgctatattatattgtaaaagcacattatgatctggagttttttgaagcatttccaccctattaatccatttccccaagatatcaatattacctaataaattagcagcttcaagtcccatacaataccattctgacttctcaccttccaatacagataattcttctggcagtatcagacttgttctattaataacctgcatactcagttggtgttcactcattgaacgcaacattttcgtagtggcaagagaatctatttggtaattacccaaagtctcaaaacaatcctgtgccatcttccaattggaagaatattgcaattctttaatcttggattcaaaattgctagaggtaaaggttttaagcataccatcaattgagtcaacatcttcaattttttcatacatatcttgcaaatctttaattaatcttatattggtgtttttttcagattttgataaacgatagcaatcctccaaatataaaatagaacgttcataggaagcggtgactaaagatcttttagctaataaatctggtggtattgttgtcaaaaatgtatccaatctttgtaacatccttgcatatgtaacctctgctacctcagttgtagcatacctgtcataatattcttttctatattgggttgtccattttttacaatactcaaaaacgccaaaaattgactcatacgccatcttaagagtatcacgttgtaaggaatttaaattatccataggatattcgaatataaagcgaaactccaccacaatattatcaattaatttaacaaattttgtctttggttcagctttgagaataatatcaacaacaatatatggaagtaataaatttgaaagatgtccatcatcctctctaatgagtgatgaaaacacatgtaatggattgttttcttcagtaccaatttttaacagatccaaagctaaagctctaatccatgttttataactttctttttcattaaatatgggatattcaagtggtgtatattccttccaagactgagcaagatataatgaagacatcaaaggatataaagtggtttgtgagattgtgttgaattgctcccataatttcttctgtctaggatatttgtctgcttcactaatttgccacgagtcactgctaagctcacagtatctaagtgattcttgcattaccaatgcaaaaaatagttgttttcgaggattctcactttgccaaaaagctggaacaattacgtcatttataatccaaataagaaattttattacttgtattttatcattaaagaaatacacattattatgattagaatagtcttttaaagaatgttttgtaacatccagcacaccaatcatactaatgcattttgcacatttctcacagattaattgatcagatgatctaaatcgatgcgaagtctctaaaagtgctcctaataaaacactgatatcctgtctatgactatcgttttgaaaaatatcatcaatatattcttcttgatgattttttaaaaatatttcaatatcttctaagttttgcagaatgacatatctattattactttttaggttgcttgaaaaaacagttatgaaatctgtaagttctcgagtcttcttaacaattcgggcaaattttggattatgctcggctaatgatagtcctactttttgagtcagagcaaacgtcacgtaaggtttaatagaagttataagactaaccttactttcaatgataatatctaatatttcataaatcaaattttttaaaatacgttcaaatgtcgaccatttttgtaaaataaatgctataaaaacatcaattatagttgacaactcttcatcagtcaaacgaataattagctgtttccaagctttaaaagcactaaatcttacctctttaatttctaaactagtttggagacaaatactaatttgtgcaagcgcagaaataatggcttttttcgacacgatcttaattaacaacataataccgttaacgactcgaagcttttcataataagtagtttttccttcaatattatggatatcacttgaataaacctgaaaaatacccaaaataacctcttggaacttcttttgaaaacgattttcttgttccacattccagtttgagtcattcaaatatagtccaccacgcctcttatccttttcaaaattagtaatcagatatcgcaatgcttgtattatacgcttttcatttttttggtcacctgcatctgggttatcactatatttatttaactttgtaatttcagccagtgttttaaaatcaaaaagaaatctaacgacataacttttgtcaaattgaggtgctcgattaataaataacttttctaatgtgtctagagaaaagataccatgtttaactaaagctactgcaaaaatttgacggctgttaaattctaacatttcttcctgttgctgttttagaaactctacctcaccatcacaaataattcgagctatttctccaaatgtgtcatttttatggttcatcactgcgtaaggaacaatataacgttgaaacatctctaaaattgttttacctgaataacctagaagatcacataatctttgaaaagaagcctttttttgaaccaaattctttccaaattgttgaagtaatatagggagaatgggtgataataactgatatggtgtctttcctaatgttctcgccaaattttgtatttgaaaggtcatcatagtatgaacagtatagttatctgagttaaaaatatccattaacttcaagagtaatgtatcaaaaagttctccatttgttgtttgaatgaactctatccatcctaatattaccgtttctgttgttataggatcattgacagattgtaagagtctcactaaagttctagtattttcatcgtttttattatagagataagtgatgtttaataagggtattattttgacacttaccaaacgaaggtacctgctgttactagcaaaacattttgttataagatcaaaatatctcgaaggattttcaacctcatcaatatataatttttgaggttgaaaatgtgtcaatattcttttcaatgcaaaaagtattccacataataaaccttcagaaaattcctcaactataggattacatataaatagccgattcaacaattcaaatgctttacttttagtattatctggtctttctggatttacattcatagtaaagatgtgagtgttattattatcacatataacacaactttcataatttaataattttgaattatttgaaaaatgtgcctcaaaacaacccaacctacccagtattcgagtccatgagactagtttacttgttatcttagcattgatacaattttgaatactcttctctagttcctcatagagattactcatatctttactcatcttaaaaaacaaactagggtctaaattatcaatttcatatttcaacaaacaaacttgatcattagtccgaaatttatataatatcgagcttcgaagtttttcaagttgtttcaactcttcaggaagtggcttacaaattatgtcaagtaactgttcattttcttcttttaatgtccatacacgatattttttattaaaaaccaaatctgctgcatttttcattattttacggttacaatcaaattggataagaagtattgcttgtattgtgaacacgttatatggcaaatctttgctgttttctggtaataagaacttatctaaatcaacccatttttcaaaacctaaaatagtaatacatagattcagatactccagagtatcagcatcttccttaactttttctgcatcaatacataaagaatatatccttaataaagtttttgccaaaatatcattgttactcagaagaccaaaaccattcttcaagaagattgaaattgcttccaaagtaaactttagtttgtttaatgaaattgaactttgatttcttaactcagacactaataaatctactaatacagacataaattttacctgtaacaatgcataatctggagttggaacacttatagatccaaatacaaataacaaaaatctgattatcttttcaaacataagatcccacttagtcaatcccattaaagaatccagaagagttaagctagagccaaacacatcgtgtggaccagagagataataacacagtatatataatttcttaagatttgaaataaatttttcaactggataaattccagtcaatacttgggaaagctcttgttctgtagtagtaattaatgataggaaatattccgttatttcatacttatattgcatattgtataaatttatcagtaggttacaccatttccctaaatgtttcctaagaaaccataatctgtgaggtacatcgtaataagacattccaacgaataatacatcctttattatcctctttattcccagtattgtctcatttgtactatatgttataggaacctcagataccaaaagaaaaggtcgtgaacttatcagaagatctaatgcttgtacaatttttccaaaaatattatcatttacaatatatttctttttattctcgtctttcaaattacttagtaatgttaataggactttcaaactttttggatccttatccaatgatttttgaatagacacattattcattaaattattttcagaaacatttttagaatcaaaagacgtcaatcgcgattctttaatagcaatgatcaattcatctagatatttgctatactgctccataatatctaaatcactttttgttagttttttattcttcttttgtattatgcctatattgaatctgtaattgttatattctcttccgtgccgcttctttatatacatgtttctttaaaagcaattaaaacttagaacatcaaaatttacaatacaaataaattaccaagaatttagaacgaacaaaagaaagaaaacaaactatatttaaaaggaaagagagctaataggctatctttgggaacaataacagtaatctaagagtctaatgctagttgtataccaaaataattttaaatagatctttttgataaagatattatatgatatattctttttccatactaaatttctaatcatggttcatatagtgaataactccaaaataatatgtatatgagccgatatctaatattctataatggtatatatattctattataagcatatacttagagcaataaggataactgtctcaagcttttcgttaaaaatgtattctgcaatttaatcaattagttattataatagatcaataccacaattacaaaagctcctatttttaaaatattatacgatatatatacctctgaaatggaaaacaaatattaataaataaactctcactaaacctcgaaaggatcatcttatatttttattcatctatacaaaacttatttatacagtgattcttacgttaaaattataatatcatcggcattgttaaaatatacttcaatttttagacttcacataattacttcacaaagcttctatacacataaaaacctacagtttaatcaacttcactttcaaaaaatattcttaaaaaaacaaactaattgaaaagctatgcggttttttgatttatatctatagttggtattctataatcagctaataatcttacatcaatattgccttactattcttattgttgattctgtccttcactgtgcatacttgctgcttgctgctgttgttgttgttgttgcaactgttgttgttgtgctgctctcaattctgcttcaaagtttagtggtcttttaaataataatatatgaggttctggagcatgacattcgtaatgttcccatcctaaagattgtgtaatacctagccctctccattcatcttcagtcaatatacgtaatgtacctacttctgagttgaaatagtcagatggaattacctttaacattgctttaggtagcataacatgtctatattcaaagttatcatccgagtatcttggcgaataatgtatagactcttgaaattccaaaacacgggctctttcctgatcagtaagttttctaccttgaaaggttctatagtgttgatacatattcaaattcaatataacagtctagtgatgtatatgcaagctattttatatttttaaaatttgatatccgcagctcaaatatattgatattccacctttactaaaagtattttataaaaatattgcaggacacagcactttaataaatataaactattactataatatcctgtttatttattatatatcttaacgctaatgtactactgcttacttcctattttttttctttgaagctttaaagatatttatttttactactatccaaaaaaaaaaaaaaaaaataaaaaaaccgaaaagataaaaaaaggtgaataatctataataacttttaacgaaatttataaatatattgtatgcatatatttttgaaaaattgggaataattttagttaaactattttaacaattgaaaattacagggttattacatttaaaaaagttaatcaactaatttctcaactaattcgaaaatatactttaatgatttcaaataacttataatgttaattttgactaaatatttactcacggcaaaatatacaccgaaaaaaatgtaagatagtatactttttctctatcttgagttagctttgagcacaattttaaataaaaaaacagatattatcagaacacaaagccaatttttctgttcatcttttaatggaaaaacttcgaactaagcaaaattgtattacaatatcaaaatttataaagtaagcacaggtgtataatattctaatattaaattttatgttattgatattagaatatttcctacttgacttatttttcgtagtagacagtttatatacattttgtgaacattactacatagtcaattatacaattataaataagcaaaaggagctactagatatgtgttatttctatgggcagctaaaatataactaactaagacgagaatacgctattcacagacaattctaatcacgcatgtatacaagggaagaaatttcaacgacaaaatttcaacaactttccatagttctaaatcttgcagaaatgtttacttatgattatgttttactaaaaaaaatatttgaaaataaaaaacgcttgtattgagatgacttcccagtgatgatagtgatgtatttctcaatattaatgtgagagagttccttatttttaggtttatttaattatacatagtttagaaggtttttgccgcaggagaaagaaattaattgtaaatgactactctttattttccaggagaatgctttggctgacaaaaaagaaagtcacatgtcataatacacaaggaagtattacaatgaaattcataatcacaaccactatgggaaaaaaaaaagtaatccacattggaaaattgtttcaaatctgcttgaaaattattcaaaaccctaatccaacttgggtcgaataattttgcgacacttaacatttttcaccacttgcaaaaaaacaaacaaaaaatatagaaatgctttaacaataggcaaaaaaacttttgttttatttttttgatttgaaaaaatactgatgtatttttagaacaggactttgttattattagggtaacaaacaagcaaactagataaataacatatcagctatgatctaataaaaaacctaatattacatccacctatatataatatacagaaacaagttaaatattgaaatacaaaacatctagttgataatatcatctatcacagatattaaacttaaaatctgcaaaggcctgacaacaaatattcaaagattattttgttttagatgcagagtaacgttttcattggtgttaaaccatctttaaatcatactgttggaaatctaaccaattcaaacgaatatataaaaaacgatattttttctggaaattacgattatatcctcttgccaataacaaattcaagatataaggaaacagtaaaacattacataaaagattttaaggattcccaagacaagacattttgcagtgatctaactatacctgaacctcaattacaggatatatcgatatcaccttttaatggagggtcgcaagaagaagctccaagatatattggtctactatcatcatggctagaactggagagtcctgatttacttcagagatcattagccttccaagttctcctgaatgaatgtcgatatgccaaatacgttggaataaaaaaactaattttagctccacctaaagatttagttaatttacaggattattctcaaattgttgcaagattactaaactctgatatttttaggccaggacaagatgctactcaacaaaatacagaaagaatgatactctctatatcattgccgttgtgcgaagatagtgatccattggcaacctgggaaatctggaacacagttagaaaattatgtgatttccatccttctttaactatttctctggctatatccaaggttaaaacaccaaactatgtactgaacagatggctttgtgaacctgtaagttgtctattagtatcatcgtccatttttgctaccaataaatatgggtatcctgtactttataaatttaatcaaaatttgattagaaaattccaggacataaatggaaattcacaaactacttcaaacgatctgtgtgtattgctccatggaatggaaaagtatgcttacagtgtcaatggtggtgaaaactcttacttagcctacattaatcatttattaaagaagggtgaccaggctatgttatctgaatgtataaatgggtccaatgaaccttatcttttatccccactgaagcccaatagtgaaaatctaacaaatgaaatatattcaaactttgaaaaagatgaagtcaaatatgacatgtatgagaaagcaatagaaaaggctatatgcaacatcaaaaattttattgataattcttcacaattcacaattttaattgcaggtgctggacgtggtgcaatagtggataagttatatcaagtcataatgaaacataatatcataaatcgagcaagaatattggcattggagaagaatcctgaagcgtgtttatatctacaaaagagaaattttgaatattggaatagccgagtagaattgattaaagaagatatgaaaacttggaaagacccaactatcaaaattgacatatgtattagtgaattacttggatcctttggatgtaatgagttgtctcctgaatgtctatttgaaattgaaaaatatcacggtaaaccgaatacaatttatattcccaaatcctattcctcatatgttgcaccaatcacatgtccgttgatatatcaaaaattaaaagatacaaatgatcgaaaaaaaaatttacaatctttttgggtattacacaaaattccatatcaagtactttcatcaaagattagtaaagtatggacttttaaacatcccatgattagagccaattttactcagcaatataccacagtttttaaactgaaacaacgaggggaaatccatggtttaattggatttttcactgcaatactatatgatgaagaaacaatcctctccatcatcccagatggtcatatagttaaagacaaattagaaaactatcacatgcataacatggaaaatatttttcataccaaagacatgatatcatggtctcctataatattcccgcttgaacaaccattgcctatagtagatgatacagaggtatctttatcaatatcaagattacataatggtagggaggtatggtatgaatggtctatggaaagttttatgtactttgttgttcctgaagaaaaagtaagacaaataaacaatcacactagtctctcaaaagatgtatcaaataataaccatgatcataatatttatataatgcctaaaacaaaatacatggggtatagggatatgagcacatttgaagaagttacaaataccaaaaatccaaatccaaatctaaatctaaatctaaatcccaaatcaaatttaaattcaaattcaaactctagtttgaccttgagtaaaagtaaaaatgcaaacgcaaacacgaatacaaatattagctccaatcttgaagattcacaacaaaattctttattaaaaaacaagaactttgttaacttaacaacagacaatgaggaagatgaaaaagctcaagatttcgctttacaaaactttaatagcggctggcaaagtgtcaatgatatacatggttgggttactgatgatccaatactggcacaagaacatggcacgtatattcataaggatattaatccaactccaacatttaatctaagtaaaaacgattctaataatactcacacttctccgcccaatcattatttaagttctccacctccacataagccaatgatcatccttccccaacagctagatttagaacctataaatgaagaatatatatctcaagaaatccatatgcgtgtgaaaaccggttcgactactatacacaatattggtgggcatgccttttcaattccaatataggattctaatatggaattagatttattatatttttattagtagtaatagatcttgtacaagaatacattactgcatattttctatccttttgtttattattattattattattattattattattattattattattattattattattatttaatttttatattttaatttttgcattatttcatagatcaaatattaaaaaagatgtcatatctgattgatgcattttaaatttctatctctgtgatactttttttgacccttattttaaaggaacggatcattactacagaaaattattttccatatattaatagatctcaaaacaaacattagcataacaaaaaaccaaaataaaacaaaaacaaacaaaaggaattaattctagttagtcaaaataatacgttcattatcaatatactcgccatagtagatggtcatttctactagttttttcctgttaattaattatctgttcataataagacagtgttatatatatgtacgtataattatacatattacatagatctcacaatcaatttgttcttttttctgcgtcttccaattccgctgcggaactgtgatttaactttgttcttttgtttttgttctttggccggttccgccgtttttgccatttcttttcttttttttttatatctttcattttagcgtgatttggttagtcatcaaaaacaaaagagtggaaaaaggaagacaataaacaaaacaatagagttaatgatgagtgaatcggagattgtgatttttttggatattctgtcaagttgttttttatttgttttttttttttttgctttctttttgctttcgttacaaattgtttatgccatatttctgcgaataacaaagttggttattatgatcatcattagtattattattaattacatctttatctttgcgaaatgacagtttccccctctgtaaaaaatttcccggcacccggtttcaactttcataatttttctgtcttgctttgttttgatttactgcagcctcgagatgtctgcaaacaacgaaaacccttttaattttcttctagatttcaacttttcttctggctttgttatttagatactgttttgccagtcaataaccagtaatctcttctttgataccctcatcttcaattctctttcacaacagataccattctgtatcatatcattcacctttttttttctatttttgtttttactcatcttgcttttcatgcttttctttttcccttttttttttcttctgtgtctttgcattcaagtaatagaaatccaagatcagctaactaattgcttcttaaatatattattaagaagtgtggaacaagttgagaaatatagacaaataaacaatcaaataatctcgtctctttctatccatacacacggacacttacatatatatatctaataatcctcactaataaggttatcaagtatgcttagggaaaagcttactttccattataattctaaaaagacaagagaggaaactagtaagtctcgaataaaactttctagtagagacgggtatttggaagaaaacataatagatgaagataagttaactgaatggtatccagattctatctccattataaaaaacccaagacatagttttcaaaataaaaattcaataagttatcgatcaacaagtgaagatgaggaggcagaagatgatataaatgataacgattccactacaggtctactttataacacaaaaacacaaagaaaacttttgaacaggcatgttcaattcattgcaatatctggtgttattggtactgcattattcgtagccattggtaaaggtctttattatggtggtgcagggttcctactaatcgcgtttgccacatggtgtataccaattctttgtatcactgtctctactgcagaaatggtgtgctttttacccattagctccccctttttaaggttagctaacaaatgtgttgacgaatccttggctgtaatggcaagttggaatttttggtttttagaatgtgttcaaatcccatatgaaatcgtctccgttaataccattattcattattggagagatgattattctcctgctatcccactggttgttcaagtgatcctatatctccttatctccttctgtgctgtcaaatattatggtgaattggaattttggttagcatcctttaaaatcattttagctattggtctgttttttttcactttcattacaatggtaggtggaaaccctaaacatgatgtctatgggtttagatattttcgtcatcattccttcaaacaatatttccctgatgggaatacatctccaggtcccaatcttggttatttccaaggttttttggtatgtttaatcagagctgctgccactgttgcaggaggtgaatatatttcaatgttggctggtgaagttaaattgccaagaaaagtattaccaagagcattcaaacaagtctttataagattgactatccttttcttgggtggttgtttatgtgtaggtattgtttgttcttcaaatgaccctgctttaactgcagccatcaacgaatcaagaccaggtgctgcttcatctccttatgttattgcaatgaataatttggggattaaagtgttgccagacattgtaaatatcgctttaatcacagctgctttttctgctggtaatgcatacacttattgttcctcaagaactttatatggtatggctttagatggatacgcccccaaaatctttaaaagatgtaataaacaaggtgttccaatatattctgtcggtatatcgttgtgttgggcactgataagtttacttcaattaaacgccaacagtgcagtcgttttaaattggttgattaatatcattacatcatcccaattaatcaatttcgtttgtctttgtatcatctatttgttctttagacgtgcatacctaacacaaagagataatttacctgaattaccgttcaaatcatggggacaaccctatactgcaatattcggccttatctgttccgtcttaatgattatgcttcagggctactatgtgttttttccaaaattgtgggatgttcaagatttcttattctattatttgatggtctttgtcaatataggtatttatcttttctataaatttatctggactcgtggtaaagataaattcaaaaatccaaaagaaatcgatttcgaagtggatattcgagagattgaagaacacgagataaatcattcctttgaaaaatataaattttataccgattaataccttgctttccctttcttccctttccccctccctggaaagtaatagattaattggtaaacactgcataaaaacataaaggcatattcaaaaggaagttctcccctctcatcgtaacaatatataatttatttatttatttatttatttattcatttatataaaatacagcattaacaaattgtatcccattattttcaaaactatgaatatagctgcttctcattagctaggtaaagtgatcattaacttattagtatacatctacatatatgtatatatgtatcatcatcatcatttatctattgaaattgttcccaccaatcaacaacatctttcccaagactatctaataaagtttttctgtttaacttcagtacacccttatttttctgtattccataccaatttttaataaccataaccaatctttgtggatcacttctaatatagcagatcaacccattatctaacatcaacaacctttcttcattgacactatctaattgtttctttgaatttttaaaggtttccaacaagtcaacaatattgttttgtaattcccatgctttatcatcagataatgattttaaaaagctatcacatgaataatctttaccaccttcattttcttccaaacatgaaatgaatccaaatattttccccatagatttgaaattaatagaacaattatccattccagtaaacactaaatccagaggagatacattatccttgttccgtgaatcaagtgaattgaataaagtctcagcaaaaaatggtggaatagatgtcttaagagtttgatttgaatcagttttttccattaccatgtatgcaaatctcctatcaatttgaccaatatcacatagtgttaaattctttaaaacttcctcatggaattgcactattccttttgtcaataatttatccatttctgttaaaaaggaagtatcccatattttttcaaaattttctttacatactatcaacagcaaaatatcattataaaaccaaaatagtgtattatatcttatgttgtcttgacttttaaattttaaatgcaatttttttattttataggagattggtaagtttttatttgccaagggagatattaaaaatccatgtcttggaatgttacctctttccaaataactaatattacctgtatccatacaattatttttatcaggattatcagcctcagtagaccatcgtggaatataatccttgaataaagacacactattcgatatttctgtagtaacaccgatttcccgaattgcatcataagcaaatgacatcggcagggtaacattatgtaaaaatctatttgaataagaagataatgtgctcatcacactttttaactttgaattttccaaagaattggttgtatattcattatctgtgttagaattagtatttccattatttgaaatagtagtattttgctccctggcattattatacatagaattctcttccatatcgataatcctctccttataatgcatattaccagtgattacatgattagagatagttccatatgaagtatgcaaatgatataaccaattagatagatcatttaaattttccaaatcgtttgtaaaatttcctataaatccatactgtttttttaatattgatcccttaaatttagattgtttattacttggcaaattatagatcaaaatatcaactatccctggaaaactttcttcatttaaaatgacatcccttaggattatcgaatcccaagattgaacactgccaccattatcaatattatctttcttgttattatccatagcacccgattgttttaaggaattattcaaattaaactctgcacatttaaaaacttcataccatagagcatctaaaccacgtcgcaacaaaattgagggtttcaaataaatatcattccaaaatggaatcatatgttcattaagtaaattagttaattgtttagtagtatgagtatctgtattgcaaaatgactggaaagtgccatattgaagaagaaaaaatctatacgataaccacagatgacttaaataaaattgatagggtatcttattagtggatatattagtagaagattcataattattaccattgtttcttgctgttattacattctcagtatcactattggataaagtcaacgttacaaaaaatctagattcaacaaaaatagtcaatattatttcattgtccaattcagtaatattttcattgtctaagccttcttcaacatcagcaatttcttgtgacattgaccatacaccttggatgataccaatacgagataatttttcatttattgaacaattatattgatccccaaattcatgataaagcaataatgaggatcgtgcttcactatccaactcaccgttcttagatggatcaaatataattaaatatttcaacatccataccaaaatatatctactcttatttactattgtttgttcacacactaatgcctatcaaaaccaatcaaaccatttgatatttgaatgatactcttggatcatgtaaagaccaacaatcaattttttttgttaaaaaaatatcttactaaagtaggagcatgatgcatataaattgactaaactataagaatcgcctaaatgcgtgataaccatgtcttgactatctctcgcctaagtgcacaacaggtgtaaccattagactcatatttaatgaccctttgttctcttagcattttactccttcagaacttttcaaaatgctcgaggagacaatgccaattgtttccataaaaggaaattggaatagaaaaagaaaccattgaaaaaaagaaccaaaaaagaaaataaaaattttcagatcatccagaacgaacagacaaaaataaaaaaaaaccaaaatgacagtaaaaggtaaaatagaatgaatcaataagtaaaaagaagtaaataaagataaacactaacaaatttatttcaaaatacagtatattctaggaagacttacttcgctgggtagccagttgagatacagtgggttaaattggtgtgactctaatataagtgctaaattttttttctttctttgttctgtcagaaatggttttagctaatctggggaaacgtattaacaatgctataaatagtgctatatcaaatacacaagatgattatgccacctctgtagatataatgttgaaaggtattgccacagcccttctagaaagtgatgttaatatagctttagtctcaagtctaagaaataatattagaaataagttattggacacatctaccaaaaataataataggtcaatgacaaatgctcaaacaaaaaaattggttcataagactgtttttgatgaattatgcaacttagtggatgctaaagagacgcacgtatttcaaccaaagaagaagaagactaatgtgatcatgtttgttgggttacaaggttctggtaaaacaacatcatgtacaaaactggctgtatactattctaaaaggggatttaaggtggggttagtctgtgctgatacttttcgtgctggtgcatttgatcaattaaagcaaaatgctattaaagcaagaatcccattttttggttcatatactgagaccgatcctgttaaagtcgcagctgaaggtatctctaaatttaaaaaggaaaaatttgaaataattattgtggatacatctggtagacatcgtcaagaagaggatttattccaagaaatgatagacatcagtcatgtagtgaaaccaaaccaaactattatggttcttgatgcatctatcggtcaagctgctgaacaacaatcaaaagcgttcaaagaatcttctgattttggtgcaattatattgactaagatggatgggcacgctaaaggtggtggtgcaatttctgctgtggctgcaacaaagactcccattatcttcattggtaccggtgaacatatccatgattttgagaaattctctccacaatcatttatttccaaattattaggtattggtgacttccaaggtttgatggaacagtttcaaactgtatcaaataaagaagatactcaagctttaatggaaaatatttcacaaggtaaattcacgttactagattttaaaaaacagatgcaaaccataatgaaaatgggtcccttatcaaatattgcacagatgatccctggaatgaataatataatgaaccaaatcaatgaagaggacgctgctaaatcaatgaaacgtatggtatatatcctagattctatgaatcaaaaagaattagaatctgacggtagaattttcattgaagaacctagtaggatggttagagtagctaaggggtcgggtacatctgtagttgacgttgaaacagttttaatgcaacaacaaatgatggcaagaatggctcaaaatgctaaacaatctcaaactgctgctgccgctgcttctagtagtggagctggtatcccaagaatcccaggtatgccaaatataagtccacaaatgatgcaacaagctcaacagaagttaaaacaaaatccaggcttaatgaaaaatatgatgaatatgtttggtggtgccggtggtgttggtggtatgccagacatgaatgaaatgatgaaaatgatgcaagatccacaaatgcagcaaatggcaagacaatttggtatgggtatgtgatttacgataataattttgctgtctttctttttattttctttttttttattaattttcttttttcatgacatgaaaataagtcttcaattatcctaattataatgatgcttgcattaaagttcaataatttttatttgttattactatactttattttatgttttctcataagttcgcatcagatatgagataaataaggttttctagtaatgtgatctctcatttcaaatcgtctctttttcattaccatgttacataccataattaattacaatataacagattttgtgataaaaataatacatttccagtatccaatctgttttatagtttacataactcatattcctttcctttatgctttttaggtttacaagtgtcaaataaattaataaaagaaagaaaaaaaagaaaagaatacaacaatcatacggtctatttattatgaaaaaccactatgcatatatatatagataaattgtgtaatataaatttagtagactaacgcatataatttttgaatatatatatatatatatattgtttttttattttactttatatatcacataaagtagaacatgtttttacctattttaatctgtttttttgttttctaaaaaataaattactgttcctttcctttagtaacattacaccgataatatattttcagtgcaactggataacacagtaattaaaaataagcagaaataagtaaatcacttaagtggtagaagtatgaattttttaaaacaaaaaaaaaaaaaaaaacaatagctggaaacatatcactaatcatatcattaaaagatttgttctgaagcatagtctatatccataaagcagaaagaaataaacaaagatattcattaagaaatgtacatctataacaacacaattaataataatttttattatgatttgtcttattcctttttttttacccctgtccttttcaaatttaggcaaattatccatacttactacaccgtttgcaattaattgtggatcaacacaaagattcctatgttcataaagcaatttataaccagattttattgtcccttcggtgacttgaagtatttgtgccactttggctgcactaacaggtatcttaaaaagtaaaatatttaaataaatagacacaacagcaatagtgattggtgatttacctgcaatttccttgatctctttacattttttagctgtatattctgcagcggtggtaacttgcataggcaaacccaaatgagaacaaaaccttggtatataagttaaattttgtgcaccactcatgttgtcagtattaattttaataaacccatcagaagatttttctctcaatatacctttcataatactaagagtctttgagaattcctttgtcttgacatgaataatagattgaatttccttaaaagttctagccacctctgcacgtctacaaccaattaaaatggatgcagccataatactttctgaagatttccccttcaaagatttttcatcatggcatagtttataagcttcttttgcacaatctttaacaattttaggtaattctgcagcatcacaaagcatggtaatcttagcaaaagctgcctgaacttcactatcctttttatccaaaacgtttttcccctgagctctatttaattctttagtaaatctcatgtctgtactctcaccttgaccaattctagtggataaattgttaccatccaacaaaggattcgaagcttcaccaacacgcgatgggtcatcaccattttggtcgtcattggaaaatgtacgccattcagatcttgtatcgactaatttatcagatagcactaacccacaaagagcacaaacaacatcaccctcgctaaatctttccacaattttgggtggatacactttacattcaggacatgtcaaaacaacattcaaatttggtcccttcctaggtcttctttgaaaagaattagcaaatgggttggatatagcagcagttgatgtagacattgcaaatgagtatttgaatgagataatgcaaataaaaaggggaaaaaatagataattaaattgataataactatgtaataataatactagtagttatgagaatgtataattagtgaatatctttcttacggcagattatataagaaaataataaatatatgtatgagctctaaaaaaatgaaaaggagtgaagaagggatgaatttataggatgtagaatatccttgaatgaataatgtttagtttctaatacgctgagcagtctacaacccactatatatctgagaacctgtaagttacgattatattctccctcatttaatacatatatctccttcttgctcttcttaattcctcttagtaatctaaaaaaaattttttttcttttttgaaaatttaataaactacttaaaatggaaaaactattttagtttcttttttttttttctctttctcctttcatgttttataaaaatttcctgtcttcattttgtcttattttcttctcgaggttttccaatgtttgattgacaggagtagtgatatacttcatgtaattatttacagatattacttataaccgtcaaggtggtactagtgatcttgaatagtggatcattatttagacatataaccaaagaataggagaagagataaagaggaaaggaaaaaaaagaaatattgtaaattaataattgacaaagatgagccatcaaaatgtcacgtcaacgacaatggggtctccggagaaattaggacagcaacatgcattatttatgactcgattacaaacatctccaagtaaatcaaataatgcaaacaatagcggtacgaaggataatgaaaatggtaatttagataaaaatgatacagaacccaatgtagcaaattcgaattcttcaaaagttattgattcattacgtgaacagatagacacattaactgagactaatttagaattgactaaacaatcccatcacttactgaataaattagaaattgtacagattaatgaaaccaatttggttgaagaattgaatattttaaaatcatcaaatgatacaattaataataatttaatagattcaactaacaaattgaagtatttagaaaatcaattaaatcaattaaaatcagattactcaaaagagataaatatcaaaaagaaatttgaagaacagattaagctactaaaaaatgatagggatgaaaattcaagtgaaaatggaattttaatgaaacagactcaatatgatattttattaagtaatcaagaagattataaaaaatattatacagaaaaaatcaatgagttaaatgaattattaaccaaaattaaactaaattatgaatcaaatgaagataataaagatagaataatcacggataaattgaatgagatggaaagtttatcaaatcgatatgaaattttagataacaatataaaagaatatattcaagatgataaattggactatttaattagtcaaaaatttgatattaatgattggattcaactatataataatatgaatgagaaattttattattttgctaatgagaggatggaattatctgatgtaacaataaataaactaaaacatgaattgaaaactaatcgtaataagcaatcaaccaagacaagaagtgtatcagatagcaatgactctaaagataaaagaactacgaaatattatggtaatttaagtacactttctcaagattccttaaataactatagtagcaatatcagtactaataatagtaatattcatattagtagtagtactagtaatagtggcaatgaagagtctgatagttcaagagtaccgtcaaatggctcaatatcaatgcttttgcctggtgtcaagagaacttcttctgtaagaagaaatcctagtattaacttgcgttataataaatgaatagataaataaataaaattcactctgagcatttaattattctgaacaaaccaaagtataatgaaagatttaatttatagatgcagtacatctcaacatatattaaatacaatattactgagatgtaaattcatatttgtaatttatttctcttaattctctgtcaattgttgtttcctgaatatttattactaatcatccttattaattttctttatttcccctattgtaaaagacatttggaaatgaaaaaaaaaaatccgatattataataatcttaagcgtaatgatatactacatacatgcaaccagatcaatggttgtaatgacatacttatagatacataaaaatataataacacacattttgtcatactaaaattattcagtatgttttatatacaatttattgaactgatttagtcattaaataacaaaggataataacgaattagacgattgatcatgtggttatgatttgtaaagtatgtaataatgaaagccattgtccatattttatctgttctagatgtattaatacatcaccgaatttaatccttgtattaaagatcattttgattcaaaaacttgctattagtaatcatttatcggaacaagttaatgctatcttagaagaatcattaaaatgcagtgaaaatggtggtaacagcagtcatagaagccgttatgcaactaataatgataatgataataaatatattattgatattctaagttatcaattaaagaaagtaaaattgatcaaagaattaagaaaaaataataaaattaaacaaagtatacaaatcatagaggcaagaatagataacaagaggaaagaagtgtcgaagatgaaatcatcattattattattaaataaaacaactagtagtataaatagaacaataatagaagttgattcattagatataaatcatttaatcgaatgggaatcaaaaattaaagaaatccaatcatttttaagtattcaacaaacgagaaaaatgaaggaattaaataaatggtttggtattgattccagtatggataaagacgattttagattattttatcaacctatagtaacaattcaagcgttaaaggatagtataaacaatattaatactgagaatgacatttgtttgttaagtaataacttaaaaatatgtttaaaatatttaaaattaattacccaaatattttatatttctataccatattttgaagaatccaatgaaaaagtaggtcatttagaatatggtgtaagtgtattagtatattattgttatattatctgtcaaagattacaactctttccatataccaagaaaggccatgtgatttacaaagatattaggttgttattaaaagattatactattaatgaaatattctaccacatatcaagatgtgtgatgttggaccaaaagagcaccaatataccagaagcgatagaagacactgttatgtattctaaaattgaatggactttaccgatgattcataactatattgaaaagatatgtaatgatcatactgacataagttcaaggaatactgttatcttaccccggataaaacaacagaaagaatataccccacatcttttttacaatgaaatgaagaagaatagtaataatataacatcaataaaacatatctctgcatctcataataaagataacaataatagtagtgaacagtggaaaaagatgcaacgaacaatattacgaacaaaaagcaaatatacacctattgttaccaaagcaccgccttcaatagtaaaaataatacctactaccaatctaaagataaaaccattggtaggtgcaaaaggaaaggacgaaactacaatagcagatagatggtttgttgttggataattcatatatttcatataggttacattatcttaattataactccaaagaatgtgtatcactatacatgcatctttctggctatctatatatgctttactttaatattattcttatttatgtatctttccatctccactattaagcccatatttgcatattttgctatgtttgtggaaaaccactagttcctaatgagcggaattttcttattccgccaaattatcttttatcttcaacatttatttatttattttttttttttgcttccaggattttttcgatttttttggtataattcgattgtttggtaagataaactttcttaaaacactaaattcatacattttcatacatatagaaagacagcagtactcccgtgtttggttagataaaactttattggcacaacttgttgtattcaatattttcaccctgtattaggctgtttaaatagaagcaaaaaaaagatatacacacagtagaggggtaaaaaagttatttctatagatttttgtattccactttttagctattttatattcttctctcctaaaccaaaaaataagtaaataaaactaaataaataaataaaatggttctctctgaccaggaattgtttgaattaaacaaaaaagctgttcaacaaggattcaatattaaaccaagattaaattataatacggttagtggtgttaatggtcccttagttattttagagaaagttaaattcccacgttataatgaaattgttaacttaactttacctgacggtacaatcagacaaggtcaagtcttggaagtccgtggtgatcgtgctattgttcaggtgtttgaaggtacttcaggtattgatgttaagaagactaccgtcgagtttactggtgaaaacttaagaattccagtatctgaggacactctaggtagaatttttgatgggtccggtaggccaattgataatggtccaaaagtttttgcagaagattatttagatattaacggttctccaatcaacccatatgcccgtatctacccggaagaaatgatttccacaggtatatctgctattgatacgatgaattctattgcccgtggtcaaaaaattccaatcttttcagcatctggtttgccacataatgaaattgcagctcagatttgtagacaggcaggtttagtcagaccaacgaaggatgttcatgatggtcatgaagaaaatttttctattgttttcgctgccatgggtgttaatttagagactgctcgtttttttaaacaagattttgaagaaaatggttcattagaacgtacttctctatttttaaatttagccaacgatccaaccattgagagaatcattactccacgtcttgctttaaccacagcagaatacttagcctatcaaactgaacgtcatgtattaacaattttaactgatatgtcatcatatgctgatgcattaagagaagtttctgcagcacgtgaagaagttccgggcagacgtggttatccaggttatatgtatacagatttatccacgatctatgaacgtgcaggtcgtgttgaaggacgtaatggttcaattactcaaattcccattttgactatgccaaatgatgatattacacatccaatcccggatttaactggttatattacagaggggcaaatatctgtagatcgtcaattacacaataaaggtatctatccaccaattaatgttttaccatcattgagtagattaatgaagtctgctattggtgaaggcatgactcgtcgagaccatggtgatgtttccaatcaattatatgccaaatatgctattggtagagatgcagcagctatgaaagcggttgttggtgaagaagcattgtctatggaagataaattatcattagaatttttggagaagttcgaaaagacctttatatcccaaggtgcatatgaaaatcgtacagtatttgaaagtttagatcaagcatggtcactactaagaatttatccaaaagaaatgttaaatagaatttcaccaaagattttagatgaattttatgatagggcaagagatgaggaagaagaggaagaagatgataatgatgaagaaaatttagatgttagaccttctgaggaaccatctctaatttaaatttactcattttttaaaactatatatatatatatatatatgtatgtatgtatcatgaaaatcaaaccataataaatcactattgaaaagtaataaaaagtatatcacattacaagtttttctatattaatctcaatgataaatatgtacatgtaatgcatatatggttactggaatcaatgcagaacaacgttttttctgtgtagttttatacatttcatttacagcaaaaacagtataaaatgtcatttattagcaatgaaatctttaaagatcaaaaaaaaaaagaaatagaatatacaattagaaagaatatataaaataaaataaaaagtagatacaaatgtatgtgcttcaaaaactgaccaatctggaagcctcttcaggtgatatacctttttcaaatatcatcaaagagacacccaagatgatacaaataccagctagaagtcttaatagggtagttgattccataatgaatgggataaattagagggtaaataaaaaaaaaagagaaaacaaaaaaaaaaaagtactatataaatacagtgagttatatagtgcacacgatataaattattcaaatggatataatttggaatattattctgtgttgaatgacttgttcttcagtcgctcaaaccaaccacataaaggattgagaaaataaataataatcttatattaattgaaatatgaagatatctttcttacaaatgttgaaatgtgcacgacagcattcgaactggtgaattcatcgagaaaaatcaaaaaagaaccaaaaaaaaaaagaaaaagaagcaattgattatcaaaatgacggcatataaccatcatcttttacgatagttgcaataataacaagtcttacgacattaattctttttttttttttaaaaaaaaaataaaggaaggggtgacagaaaaaggacaaatgaacaaaatagagacggaattaaggaaaaaaacagagaaaagagcggaattatttcagatctctcctgtttctttctgtttttctttttttttttatcttttggaaataaaccctactatagatcagttgtaatccagtatactttactctaaatttttttacagttagtaatgcaagccttaaccttttgtgtcttaagagctctagtgaaagttatatatatatatatatatatatatatatatatatcttctcttttcatttctgctatcaaccattcagaaaatcgttttggagaacgcccttttttcttcttgtttaaaattttccgccagtcggaaagagcgacgattcctcgagaaagacggaaagagaaactggcaaatggggatataaaagataaaaaaaataaaagaaacaaaaaaagagaaaaaacggaaaaggcacggaaatttgcgacagaaatcttctaaattcctccttttccctttttcccaccccttttccgacccgtctcccccttttctcgtgcatagaagtataaatacacatgcgcacatttacattgttgtctaatctaattcaagcaaccatagttgcgtctctgcagaagttgtaaaaagagattgttgtcgacacttactcgaagctttgtaaggttgttcggttacgttgttctttatttcaacataaactgaagtttttgatcctcttattctttctttgttgctctccctccttctccttttctccccccccccttattttcatctggtgactgataaataagcaaaaaataaataaataaaaaggggcaaataaataaattatctataagaggcaaattaagataacaaatttttgactgatacaaatagattacaagagataaaaagtagaagtaaaagtaaaaataaaaacataaacaaaaataaatatgactgaatctaagtctaatgcaattagcgcagtttctaatcccaatacaacaccttcccactctggaaatattattgtagtatccaatagattacctgtgacaatcaagaagaatgcggaaactggtgaatatgaatactccatgtcatctggtgggttggttactgctttacaaggtttaaagaaaacttccacttttcaatggtatggttggccaggtttagagattcctgatgatgaaaaggaaaaagttaaaaaagatttgatagaaaaattcaatgctattccaatctttctaactgacgaaattgcagatctacattacaatgggttcagtaactccatcctttggccattgttccactatcatccaggtgagattaactttgatgaaaacgcatggttggcttacaatgaagctaatgccaccttcgctgaggaaatcgtgaagaacgtaaatgataatgatttgatttgggttcatgactaccatttgatgttgctgcctgaaatgttgcgttcaagacttggtaactctgttaaaaatattaaactaggttggttcttgcataccccattcccatcatcagaaatttatagaatcttacctgttagacaagaaattttaaaaggtgtcttaagttgtgatctcttaggttttcacacatacgactatgcaaggcatttcttatcttctgtgcaaagagtattgaatataaacactttaccaaatggtgttgaataccaaggaagatttgtcaatgtcgcagcattcccaattggtatcgatgttgatactttcactgaggggttgaaaaaaaagagtgtacagacacgtattcaacaattaaaggaaacgtttaaaggttgtaagatcattgtcggtgtggatagactggactatattaaaggtgtcccacaaaaattgcatgcaatggaagtatttttaaatgaacatccagaatggataggcaaagtcgtcctagttcaagtggcagtcccatctcgtggggacgttgaagaatatcagtatttgagatccgtagtcaatgagttggttgggagaatcaatggtcagtttggtaccgtggagtttgttcctatccattttatgcataaatctgttccatttgacgaattgatatccctatatgcagttagtgatgtctgtttagtttcatctacacgtgatggtatgaaccttgtatcatacgaatatattgcttgtcaacaagaaaagaaagggtcattaattttatctgaatttacaggtgctgctcaatcattgaacggtgcgttaatagtgaacccatggaacaatgatgagttatctgatgccatcaatgaagcgttgactttattaccggaaaagaaacaagctaattgggagaaattgtataaatatatctctaaatatacgtctgcattttggggtgaaaattttgtccatgaattagctaataccagcagtgacaacaacgtttctaagaaggtctctacatgaataatatacttatatgagcagacaaacagtaatattgagaactgctctgagctaataatgataacagtaatataaatagtatggtattaactatgacatgttcttaaactgactttctatatcaccaataaatcggctttctcatcatgtataactaatgtatctctatgtacatgtatatatatatatatttgtttatatttgtttatatttatttatacgatggatggatgaatcacaatctacttaaaagctctctgtcttttttttcctcctatcttccttggatctgtttcatatcatagctttgttaatctcttttatctgttaaatagacaatgagaaaagggggaggaaaataaatactggaatggagataaacggtgaaagtactggaaaaaaaaaccgaaagaaaaaagaaaggaaaattaagtcgaaatttgagatcaaataaaataaaaaaagagatggaggaagagaattagaaaagacgatagtaataaggttaacaaagtcaactgcagatatactttattcttcctttttttttcatgtgaaaccacatagtttactttaagcaacggacactgaattgtattataagaaagttgatggttgattaaaccatatacgtattcatacatatttctgcattcctggttatctctttttgctgttcttataataatagactgttttttctaccattaatagttctatcaatttgatcttttcatttttataaaattccaatcaaagcaacttttaacgtctacttttttaagtaattagtttattcagtctgtcagacaacacttttatttcattccatataatctattattaattaaagcatacacacacacatatatatatatatatatctaaatacatctacaaatgggtcaattattatcccatccattaactgagaaaactattgaatataatgattataaagatcacgtaggtacaacctatttatcacataaatgtccacggtttttcaattgcgtgggttcaatgcaaggttataggctgactcaagaagatgcacatatgataataaacgaggatgaaactttatctttacaattttataatccatttaagaaaagattggaaccgtatttaataagtctgtttgcagtttttgacggtcatggtggtgataattgttcgaaattcttagctggtgggaacggaaatggttataatcctaaaaaggggttgagtaaatggattgcatattcttttgaaaaccactcatatggagacatgaaggataatgatgttaacattggtgacaaattatatagaaatattaaattaacaagaaaattccatagtttacaaggtttaatatcacaaatcattaaagatgcattttttcttcaggataaggaactatataaatatttctccactactccgtgtggatctacatgtatactatccttaataattaatggggaatggctttatgtggctaattgtggggattctcgttgtatagtatcatctaagaatcgtggtgtgaaaacaatgtcctttgaccataaaccacaacatattggcgaactgttaagaattaatgataatggtggaactgtatctctaggacgtgtaggtggtgttcttgcactgagtagagcatttagtgatttccaatttaaaagaagtgtttcgtataatcataataatcataacaatagtaatagcaagaaattttccattccgccacaagaagcacaagttacagtagaaccagatgtaattatgcataagatagactataaaagagatgaattcttagtccttgcatgtgatgggatatgggatgtttataataataaagatttagtgcaatttattaaatatcatttgagtttaggattaaaactagatgaaattatgcctaaattattagatcatggaatatcgcaagctaacagtagtactggaattggctttgataatatgactgcaataatcgtcatattaaataagcagggagaaactttaacagattggtatactaaaatgaagatccgtctagaaagggaaaggggtttaatacgatgaataaagaaactttaagcttctcttttctttataagcagttttagataatgtaatgtatatacatctatgaactatattaaccataagtttataacgacaccatatttataattagttattatcatttcttcatataattaatatatagaaaaaggcatatatatatatattagtattatttccctgatgaattatcatgtaaaaatctggctgtatgtatctatgtatatttgtatatgtatgcctttgtatatgtgtagcactatatgcgtatatatgcgtgtgtgtggatggttaaccggtttgatgtgcgaaacaaagttattttatctcttttcttgagaaaatataagaatgttgaaaataggaaataagagatgaaagctttgagagattatttgttgtaaataaagaaacaaacagtagttaatagaaggacgtcagagagttgatagcactgtaaaattgtatataaattattttactttatttgtttaataattttcatttttaaccaaaaatatattagaagaaataataatactgatagaagagattaatcaaacgttggagaacaacactaaagcaggttttgaaaatccaaatatagcaaataccatggaacaagaccaatcacatcatagacatgaatatgtatctaagaatgttgaaaagactactactaatgatttgttgggtttgaatgatagagaacaagatgaaacagtcacagtaggaccaattgctaaagaatttacactagatattcctagaattcccagtttagaattacctttgaatgtttcaacgaaacattccagtgttcaaagagctatagagatgtgtggtggtattagtaatatcaaaaaagcctttaaagaagagggacctatagattctcaagatggattagaattgtatttaaataaaggtgatccagggttttttaatgaacatcctttaattggaaaaagagtaccatatagagatgattctattgttttaaagattactttaccaaaagggacactagaaaaaaatgatggggatttaaagaaatcattaaactcacttaatgaaaaggattatagggttactcctatagctattgttgataacagtattaaatttagagaattgtcagatttccaagttagattagataattcaagttctgcaaaagaatttgaaaacaagattcattctttatcatggaaagagttacgacaatatgtggattctgtacaagataatgacactagaccctttgaaaatattaataatattattttaaacagagatttgaaatgtccaaataatgatttccaattaccaccaccaccaaaattcgcaatgaatggattatcacatttatataaatataaaggtaaccccttagccagaaaaacaaatggtgtcacagaagtcaagaaatcatatattaaaaattatcaaattttattacatggatttaataaaaatattaaaattccattggagccctgtgaagaagcaattacttgctatttaatggctcagaaagatggtatttaccccggtacaaagaaggaatctaaattttatgaatcattagaagaatgtttaacaatattaaagaaattatttgagcagagaccaatttggattaaaagacacattgatgggttgattccgaagagaattcaccacactttgagggtggcattagcattaataagttatagatttgttatgggaccatggagaaacacatatattaaatttggtattgatccaaggagttctaatgaatatgctaaatatcaaacagaatattttaagatcgtgaaaagacttgtaaattcacccttgggtaagaaaaatatcccaaaaattccttcattggtatttgaatctaatagaccaggtgatatagatagtaggtttagatttgatggtactcaaatcccatggtatttgatgttgcaaatagatattttgattgatgaaccaaatattagggaagtttatagtaaagtggagtatttggaagaacctaatgaattgactggctggtttaaagaattggatttagttaaaatgagaagaataatgaaatatgagctgggttgtttagttcaagggaatcataattttaacccttatagactaaaatattataagtctattagaaatacaaatgaaacaaaaccaaaggagatgagctcaaaggatgattttaagaataaattggatgcagaaggtgatatagagatggaaaattcagtagacaataatatagatgcaagacaagatgatgatgatgatgatgacaatggtattatatcagatgaagctgatgaagaagtcttggaggatgaagaggaagaagaagaagaagaaggagttgatgataatgaatcaaatgatatggataaagcatattataataataatgataataatcaagaacaatttatcgatccaagtatgaatgtttatagaaagaatacctctgatataaataatagtgtcaattataagtatgcatcatttggagatattattgacagaattgcaaaattgaatccttctgaagcgaaaatattagaatctcaattagaaggatttgtacatgaaagtcgtttatgaatatataaatgaaagtgtaaagtttgggtacgtatattataatagtattaataacaaatcaagtaatttggtttaatgccaaattacaaacaaaataaaatttcagtatatggatataatttgactgtcgaatatttttgaatgtaataatatatatatatactattagatattctcttaatgatctataataaccatctgtttagattctcttcgtctctgtatagtttagctactctatatatttcctttatctccattattcaattttctttataaaaaaatatcttttaaaagacagaaaagaaagggagaaaaaataacaaaaaattataagagagaaacaaagatatagtgaaataacaatgcccatatagtggtataatagttataaattgaataagagaagaaggaagaaacaaactaagggtgtgttagtatagtatcatttaataactgaaagagtacataaactattttgttgtaatttattctaatataatatagtaaacctataagagaagaaaagcgcaagtgatgagaataaatccaaatttacttagaatttcgattagatatgcttcttccagcagtggtggatatcctgggtcaatgagaacagcattacctcgtagacctataagaaaaatcccagtaggtaaagcacgtcctgctatatattatcagtttgatgttgcagtagaattgactgatggtagtgtggttatgagaagatcacagtatcctcaagacgaaattcgattgattcaggatcaaagaaataatccattttggaatccaagtagagatgatttgatagatgtggatcctaattcagttggtaatattgaaaagtttaaacaaagatacagcggtatgtttggttatgcacaagatgcacaggagtcatcaaagtcatcttctcaaggaaagagagttaaaaagaaaacttcttcgaagtttgatgatgttaacagtaaagataaagctaatgttaaggagtctataactaagaacaagggacaagtaccttctgaattagatgatttcttagatttcttagatgaaactgggtcgacatctacaaagaaaaaatgagttctaaattatttttatatattcagaatttttcttctgatcataagagatataaagagggggggaagagaagtaaattatatgcatgtgtgcaaaaagaataggcgattagaaataatgataggaaagacatcctaacttcgcaaaggtactttttttctttttgttatatgttgatagtggcattagctactagtgttattataatgttcttattctttaggcctgtaaatatatatctgtttgattcaaaatactatcatgtttatatattatgttatataatctttataacataacctgactttcgttgtagaggatgttctccggaatcatgtttcccgaaaaaatatgtgttttatcaacgaaaatcgatcttgaaattttcgtttctttttttttttttttttcttttcgctcgaggaaattttcatttttttttctttttgttatctctcatcgaatttcttgaaaaaatttttggtttcgattgcggttagtagtcataattgtgatagagtagtagtaatagtaagagtaatagtagttagcaatctaagttattgttactgctgtgtgtgctttcccttcctagtgataattattgtttttgttattctgatatttactgatgtctgtttagctttttatattcaaattctatctaaacctcttttatacagtgatattctttgctgctatcaataattttatattgttgttatttgttgttgtaattaatacatattacttttcaaattgtcatttctatcgaaactttgcggtatcttacccagacgatactactcgcgagtacctattaagaagtctgtgtctattaaaaggatgagtgttgaggaagtccaaaaggctaagcaagctgttgaattcagcagagaacatctagaagggatcttaagaggtagattcttctattctccagctttcgatctttatgggggtgtttctggtttatatgactacggtcctccaggttgtgcattccaagccaatgttgtagatgtttggagaaaacacttcgttctcgaagagagtatgttggaggtcgattgtactatgttaaccccatatgaagtcttaaagacttctggtcacgttgataagttttctgattggatgtgtagagatttaaagactggtgaaatctttagagctgaccatttggtcgaagaagtacttgaggctcgtttaaagggtgataaagaagcaagaggtattaatagtaatgaatcaaatgatgaagaaacagataaaaaaaagaagaacagaaagaagaaagttaaggaaatcaaggctgttaagttagatgatgaagttgtaaaggaatatgaaactatcttagccaagattgatggttactctggtgctgaattaggtgaattgatggaaaaacataatattggtaacccagttactggcgataaattagaacctccaatggctttcaacttaatgtttgaaactgctattggtccatccggtcagttaaagggttacttgagacctgagactgctcaaggtcaatttttaaatttcaacaaattattagaattcaataacggcaaaacaccatttgcatcagcatctatcggtaaatctttcagaaatgaaatttctccaagagctggtttattaagagttcgtgaattcttaatggcagaaatcgaacattttgttgatccattagataagtctcatcctaagttcgatgaagttaaagatatcaaactatctttcttgccacgtagtatccaagaatctggttctactgaaccaattgtagaaacaattgaaaaggccgttgctaccaaaatggttgacaatgaaactttaggttattttattggtagaatctacctgttcttaataaagattggtgttgatccaactaagttaagattccgtcaacatatggctaatgaaatggcccactatgctgctgattgttgggatgctgaattaaagacttcttatggttggattgaatgtgttggttgtgctgatagatctgcttttgatttaactgttcattctgaaaagaccaaagaaaaattagtggttagacaaaaattagaaaagccaatcgaagtcactaaatttgaaattgatctaactaaaaagttgtttggtcctaaattcagaaaggatgcaccaaaagttgaatccttcttactaaacctttcccaagatgaattaaaggtcaaagctaaagaattagctgaaaatggcaaagttacttttaacattcaagatattgaaggtgaagttgaattggatgacaaatttattaagattgaagaaagaactagagttgaacatgttagagaatttgtgccaaatgttattgaaccatcttttggtattggtcgtattatttatgctgtttttgaacattcattttggagaagaccagaagacactgctagaggtgttttatctttcccgccattagttgctccaactaaagttttgttagtgccattatccaataacaaagaattacaaccaattgttaaacaagtatccgatattttaagaaaatctgaaatcccattcaaagtggatgattctggtgtttcgattggtaagagatattcccgtaacgatgaattgggtacccccttcggtattactattgattttgattctattaaggatagttctgttactttaagagaaagagattccactaaacaagttagaggatctattaatgatattattaaagctattcgtgaaattacttatcaaggcgtctcttgggatgaagctactaaagatttggctccatttgtgtcgcaagattctaattaagttggtgtaaaaaggaaatggtgatacaagtatactcaatacaaattattgtcatttgattgtttttttattctcttgctctttctcgcttaattgtacatagggtttaagagtcgtcgtaacacaatgaataactcagttcattaattaatataatttgtaaattatatgtatatatggttcttttttactaaataaaaataaaaggtaacaaaattaatattacccaggttggatgttacttgtataaatttacccttttcatacaacgtgtttaaaagaagttgaaagatattaaaggaaaaaaatatagaataaaaaaaaatgtaagaatttgaaaaatgaatgtaaagggattgttcaagttaggaaacttgttgttatattagtgattagaagctttgtatgtgctttttatagattttgtcctgaagagattacacagaaagtagcataaagtgaaggcagatattggtacacttctgtatctagtcaacaaccacattagttatataataatcagtaagtgagaaatataccaaaagatgttatcaacagttaaagaaggggctaaacaaatggtgaagcttttagaaaagtttccacaggaaagaatgaagcacatgatttcttttaaacaaacacaattagatagatttagacgtgtagcggggttgcaggtagataataaaatagactccaacgaacctaacttgtccattaatgaaataaaagatatgttaaatagaagtaaaggtccattaggattacagcgagatgttttaaaaaagattcaggcagttataccaagagaccaatttacagaacaagatttgaaaaggcagatctcttcccttgagaatataatgtctaataaatataaggattattatgacgttggagataaattgtataaacctgcaggaaatcctaattactatgtaagactaatggatgaaattaatggcaaaaagaaggaaacattcataagtgcaatgaaagtaatattctttggtaaatagtggtgatccattttcatagttgtgttggttttttttttgttttgatcttcctttttggaacaatgaactgttaacgtatatatacatggcagttaccaaatagctatatatatatatgtatgtatgtatttatttatttatttattagtatgcatatacatatccagattatcaataaaatctggagaaatattttcatttagtagataataaatagtcctgtatataccaaaatagaatacaaattcaaatatcgtctactcattttatttaattatttggcataacctaccaatatttgttgtttcttttcaccatttatgtagtatgtatttccaactttttttaaaacatgtttggcactttcaatagaatcatattcgacaaaggccaaatgacgagcaggaaccattctaacttcaataaagccatcacattggaaaatatctattagttggttctcctctatacttgttggaatatcttgaattaaaagaatcttatttggaggattttcagatacattaactttattttgtattttatttaatgagacctcgggtttattgatttgtcttgttagttctgtgaagctttgttttttcttcgatttggaagttttattgctattttgcttggagacagcacttgatttaattaatttaatcttgtgttcttcacttattttatctatctgttcttgagttaaattctttttggaccttaatttgctccgaagtctccgtaattttctcttcaaattcaatgggtcattagttttcttcaatttctttgatttctgaatctttactatcttgtttagtaattttggattatctttatatacttccatatatgatcgtttcttagaatattggatctttatacatctacccataaatttcatattttgaaatctttttatgaattttattaccgaatcttcgttatcaaaagtgatataacatttattctgaaatctatacgattgaggacgtgagatagagatgatacctagagacttatcgagtaatggaatatctttccttgagccaaatcgtaggtctggtaggctattcatataatcacagtattcgttattggggttaaaacattttaataatgctttaatatagttttgtttgtttttgggcctttgtggtagattacttaaaaatagtgttgtcttagacaccatagttatcaatatctatgtttaaatactttgtaaagtagaagtagaggttattaaaaaaatctacgtatctgtaggcacacgtgtgtatatgagtgagtgggtgtgtatctgagtattcgtatatctgtgtatcagtgtgtgtatgtgtacgtatataagataccttattaaacttgaggtcctatatattttttattcgtggtagagataaatatttatcttagaaggggtctttgtcaaagcagaaaaaaaagatgaaatatatatatattgaagaagaaatccagaagatcaaaaggtgaactgagtataacagagaattctttgatcaagacacttcaacaagaaatatttatttattagaatctgttgattagtagatgtataatatataacaattgttagctattaaaaaaaaaatgtataacttcatagaaaatagtatatataaaaagtatatatattttccctttcaaacctcaatgcctctaaaagatatcctaccttctgagtatgaaagacacataatgtaaaaaaaaaagtatgatatatgttattatttaaaataatattttaaacttatatttatattatgttatattatactatatactgaagaaaaataaataaaaagaatcaaacgaaaagttcaatctttaaacttatttggcagccttagcagcagacttggtaaccttaccagccttgtcggacttttcaacagacttgataacaccaacagcgacggtttgtctcatatctctgacagcgaatctacctaatggtgggtagtcagtgaaagcttcaacacacattggcttagatggaacgaatttaactaaagcagcgtcaccagactttaagaattttggattgtcttctaatttcttaccggatcttctgtcgttcttttctaataattcgtcaaatctacaagcaatgtgagcagtgtgacagtctaagactggagagtaaccagcagagatttgacctgggtggtttaagacaataacggtagcgttgaaggattcggtagcctttggtggatcgttcttggagtcaccacagacgttacctcttctgatttccttaacagaaacgttcttgacgttgaaaccgacgttgtcacctggcaaaccttcagctaattgttcgtggtgcatttcgacggatttgacttcagtggtaacaccagctggggcgaaggtaacaaccatacctggcttgatgataccggtttcgactctaccgactggcacagtaccaataccaccgatcttgtagacatcttgtaatggtaatcttaatggcttttcagttggtctggttggtggttcaatggcgtcaatggcttctaataaagtcttacccttgacaacaccagccttggtttccttttcccaacccttgtaccatggagcgttagtagtggcttcaatcatgttgtcaccgttccaaccagagattgggacaaatggaacagtctttgggttgtaaccaaccttcttgatgaagttggcggtttccttcttgatttcgttgaatctagcttcatcccatttgacggagtccatcttgttaacagcaacaattaattgcttgacacctaaggtgtaagctaataaagcgtgttctctggtttgaccatccttggagataccagcttcgaattcaccgacaccaccagcaataatcaagatagcacagtcggcttgagaggtaccggtaatcatgttcttgatgaaatctctgtgacctggggcatcaataacggtgacttggtactttggagtttcgaatttccataaggcaatatcgatagtaatacctctttctctttcagcctttaatttatctaagacccaagcgtacttgaaggaacccttacctaattcagcagcttccttttcgaacttttcaatggttctcttgtcaataccaccacacttgtaaatcaagtgaccagtggtagtagacttaccagaatcgacgtgaccaataacaacaacgttaacgtgagccttttctttacccatttttgcttgtgtcttagtgttcttgtttggtttattgcgggaagggaaataacgataagaaagatctcgtacaagaagaagacggaaaaaatatacaggggaaggagcagagagaacaagaaacctaacttaattatattaaaaacaggagagaagagatggtgagaattgcattaggacatttaaaggaaaaaggaggaaatggatggaaaaggatgaaactctttccttaaatagtccttgttgaaaagaaaaatacaaagaaaaaacaagaagaaaaaaaaaaaaaaaaaagcaacaaattttaaaaatggagaagaaaaaaatttttttctgcaattttttttttgtttgtttgtttggtataagtttctttttttttttttcttcttgctttttcgtgtgaggtgacaatagctggttttttttttctttttcttccataaaatttctttttttttttttggttttgttttgttttgcagtggttttctttttggtttgtgaagagagagagtgatcttgctgtatgttcattatgccttgccaatagcaacagcaatagtacaactcattcccttacacattctttctgttctcttttctgttctttcgtttttcgccgtttggatatataggaaataattgtacatgcaacatttgaacctaaatttgtgacgcgatcttacagtttagtatgtaatagccgtatatcggatctcattgatttgtagctttaatatgtcttggttttgtgtgatactaagagatgatttttaaaattagtgctaaggtttaaacaagtaagatgttggtttaacttctagtcttgggctttgttcaggttcaatggtgttaagaaattaaaaagatattttcattgtctttttcgtaaaaattatctctttttttttttgtttaaatttagctccaaaattactgtagtatgtagaaaacattttattttatttttcagatattcaaaaaaaaatgtaaaatatctttttataaagatatgtgtcaatcgaagttaaatttatagtaactgtatgtcagtggttaatctaaatatatatatatacctcgtaagcacctataatttttgtaagtgatctttttagtcaacagatttttggagaaaaagataacagcgtcttccgatgtagtgtaacggctatcacatcacgctttcaccgtggagaccggggttcgactccccgcatcggagttttttcttttttcggatatttttggttcatgtaataaacacccttaggttgtgtgtttctgataacagttaatgttgttgaaaacacaataatatttcacttggatagatataagatatatatactctttctatatctctaaatgtaatattcctacacgtctaatcttatttaatccttggctcctttgttcttggctgctctcccttacttatgttaattacttctgcttttatgtatgtttgtaaaattttgcaaaaaaggaaggtttacaaaaatacctctgatattattgtcaacgttactattatctgttctgaatgagaggaatatatacgtatttgttcaactgaaatataaatacacagtttttgtccagtttcaagaatatttgcattttagtatcataaggttatttgtgattgaaaatgaaccaaatgcaatcttcttttcccttcttttcttttctttttttctcttgtccaataatttaataacgaagagtaaaagcataagaaaaaatcagcatctgttgaatataaaatatgctgttcaatgcgacccaagaataatatcattaatcaatgtataaatatcagaatatatgtcacaatatatataatatatatttgtttatttttgtgataactaattagggatggatatgttaattctgagaaagactccttgtgacaacataaaggtatacctccaagatttttgaccattttagtgttgcttctcttctcttctcttccctttcctttcctttttttgttttttccatttttctattgatttcttttctttccttttcttttcttttactatccctcagaatgtctttacccttattgtgtcttcttgtcctagtatattaaggtcaagggttaaagtcaaggttaagattatgatcactatcaccattaccatcaccaccaccccttaagaattaacatcccaaactacatatataaatatagtcaagtgtctacaacaaggacacgttttttcaattctttttttttcttgttgtttcctttattacttcctcctcttctttgacttcatactactctctcatccatatctaaatcttctttctaaattcatactatcttaaaaccttgcgtcacatttacttgattttacactttaatatgaaatttgaggatattgataaattagcaatctctacgttgagattattatctgtcgatcaggttgcaagtgcacaatctggtcatccgggtgcacccctagggttagcaccaacagctcatgtcctttggagacatatgaaattcaatccaaagaatgttgggtggattaataaagatagatttgttctctccaacggtcatgcttgtgccttattatactctcttttacatttatctggttatgactattcaattgacgatttaaaacagtttcgtcacttaaattcaaggactccagggcatccagaagctgagctacctggtatcgagactaccacaggtcctctaggacaaggtatagccaattcggtgggtcttgctattgcacaagctaattttgctgcaacttataataaaccaaatgataacatgataatatcggattcttacacttatgttttccttggcgacggttgcttgcaagaaggtgtggctagtgaagcatgctctttagctggtcacttgaaattgggtaacttaatcgtgttttatgatgacaataaaataactattgatggtaaaacacaattgtcttttgatgaagatgttttaaaaagattcgaggcttatggttgggaaactttgacagttgaaaacggcgatgaagatttgaatgcaatctcagatgcgttagaaagggcgcagaataacaaagatcagccttccattattaaagtcaccacaacaattggatttggttcattaaatcaaggtaaagaagtagttcatggatcaccgctaaaggaggacgatgttaagcagatcaaaaagaagtttggattcgatcccaataaatcgtttgtagtaccacaagaggtctatgatttttataagaataatattattaaccctggtattgaagttaataaaaaatgggaccaaattttagaaacatatctagctaaataccctaaagagggggaagagataaaaagaagattaaatgaagcacttccatcaaattgggatcactgcttaccaacttttaaacctgaggattcttctatggcaacacgaaaattatctgagatagtgttaacaaaaattgttcatgaattgcccgaagttattggtggatcagcagacctaactctatcgaatctgactaaagcaaaagacagtgttgacttccaacctccacaaagtgggataggggattattctggaagatatattcgatatgggataagagagcacgctatgggtgctatcatgaatggtatctctgcatatggagccaactttaaaccatatggtggtacatttttaaactttgtttcgtatggtgtcggtgcattacgattagccgctatttccaatgaacctgtaatttgggtcgctacacatgattctattggtttaggtgaggatggtccgactcatcagcccattgaaacattgactcacttaagagctattcctaatttgcatgtttggagacctgcagatggtaatgagactgttgctgcatataaatgtgccattgaatcaaaacacacaccaagtgtcattgccttatcaagacaaaatttaccccagttagaaggttcctgtcacaaaaaatctttatatggagcttacatcatttatgacgtggaaaatccagatgttatcatcacctcaacaggttccgaagtgtatctgtgtattgaagctgccaaattactaaaaaaaagaagcaatccaatcaaggcacgtgtaatttctcaacctgactttcattcatttaataaacaaaccaaagaatatcaactttcaatctatccggatagtgtacctgttgtctcggttgaagcaggtgcaacttatatttggagccgctatgcacacgaaagcattggtattaatagatttggatgttctgggaagggtttagatgtgtataaatattttagcttggttccagaagaaattgctaaaaaagttgatataatattgaaatcatatgaaggaaaagttgtttattcccccattaataaagttttacctttataatattctctttttttttttatttttttcttgactataaataaatatattaaaataatttacattgttatttatttgtctagtttaaggaagcaacctttaatctaaaacaaattcaaaatatttgttttgaaatgtattcctctttaacagtggtggatttaatactttttcttcttttgataaaatataaaaaattataatgtaaagtagccttttgaagaatattaccattttttgtaggatttataaataatcattttttcttaagtaaagagtgtgctacgggattttttcatttatggatactagcatatgtgagatagttagagtgtagctattataaaactaaagaacatgtttacagtttggaatatgttatgcaaacaaattttcacttttactcaagccgtagataaacgattttatcaaatatctagataatctacccagttgatatattttcagtgaaaacgcctctgttggaacaatctgtatctattttttatttttctggcttgtcttaaataagtcatagtacataaatattattactgtctgaatattagcaagttagatgttgagatgttcttaatcagtgtctgtctctatatcagtacttatatcagtctctgaaatagtttcagtccctaatgtgttcttctttagagctctgtttgtctcatcagaattttttcctctttcattattatttatgtttttactaccctcaatagtagttaggtttatttcttcacaattgtctcttggataatttgatgtaaaatcatcctcaccctgatctatataattatcgaaagttttattaaaatcttctttttttattagttcataaagcaacgatgtatcatcattcttagctttcctatagattaaattttcttcattattatattttttagtttgatcttttatccttaatttggggatttctatctctggctctactaaatctaaattgtcaaaatttattgttttattgatacctaaaaatttagagttattgaaaccgtcaaaagtatcgtcattagcagcagttttaagtttagttttgacattattatcatttcgactttctaaagatggaatatttgttggactatttttaatatttgtcaaagatggaccgtcacttttaattttgacagagttttttcttctaattgagggtattggtgatttgaggtctgcataaaattttctttttcttcgacctggtgaatttaattggacaattgggctatggacatagttgttaattaaatctgaatctgtaacctggttagtttgtaaggatgataatttggagcctaattctttgattttagacttcttttcgtttaaaagatttatcatcatagcctttgtcactttatcgcgtttttctaaaagagcatctaattgttttctttcattaattgatttatcaatctgttcccttagactcttgttttcttgtaataaaccttttatcatggagttcgacgtttttaaattttcaaacatccttgacgataacaaaaacaaatcaatttctccattttgaactatttttaatgtaaattgagctaaatttcttataatatcagtatttgaatgcaattcaagtgtaaatgacaaagaattgtcaatattatcagacgaattgatattgtagtgacaaacaaaatctgaatactcaatcacattgtcacattggaaacaaaatatttgattaccagttaatattttaattaattcgtaccatatgcatattctataaaattgatcttcttccatatttatactattatcattaaaccattgttcagaaatatgtgacttataaggaattgatacagatgtaaatatttgtaatgaatctatggtgacttgctttttttcccaaatgtccgaaccatcacttatttttaaagactcaacgtttaatttaactaattgatcaatatttaaagtggataggcatttatcgcatgtactattatttccgtctataactataatactttcacagagtccaaactctacagtagtatatctttcagttgatgttaaaaatgacgatttcttaattggtaatattttaacacaactggtgaatgatattttcatgacaaaattaaaattgaatccatgaatttatatatatatatatctttgtgtatgagatagtctatttgtttaatattgtttttgtgtttatgtgctatcatctctaaatgaatgtaatggcttgacatctaacatatatagttagcataaatgagcaagcttctggtataagttattattattcatagtgtttgtatttgttccctcttaatacaaagtaatataagctttggtttcactttcggaaattttttatattatttgaggggaaaagctgatattttcatgagtaatcattgtgagtaatattaggttaataatgattaataattggaaatatgagtcagccataagtaattagtaatcaaacatgtttgacaataattactttttctatctgcccgtttcttttttttgttcacacgttaatgatcttgaaataagatcaagtaatattaaagcgcataatatatacaaaggcaaactatttttatttgatatcagtccttttagttaggcaagaataaccattcatccctactatcattccctccttatcaatattgctagtttaatcacttctttactgttttatgcttaagtgcaccggctgatattttataatcaaaaaaaagtattaaataaccaactatgactatggatcagcacgaacctaaacatgagccaatattacctactgaagaatatcccttgaatgagccagaaccagagcattgtccaggtccagaatctggaatggcaggaaaagcagatgcgtgttctggttgtgccaataaggaaatttgtgaaagtttaccaaagggacctgacccagatatcccattaattacagaaaatttgtctggtattaagtataaaattttggttctttctggtaaaggtggtgttggaaagtcaacgtttactactatgttgagctgggcattatcagccgatgaagatttacaagtaggtgcgatggatctggatatttgtggtccctctttaccacatatgttaggttgtacaaaggagttaatacatgaatcaaattcagggtggactcctgtctatgtaacagataacttggctacaatgtcaatacaatttatgttaccagaagatgactctgcaattatttggagaggtaataagaaaaatcaactgattaaaaaatttttaaaagatgtagaatgggacgaattagattatttagttattgataccccaccaggcacttcagatgaacatatatctattaacaaatttatgaaggagtctggtatcgatggtgctttaatcgtgaccaccccacaagaagtggctttattggatgtccgaaaagaaatagatttttgtaaaaaggccggtatcaatattcttgggttagtagaaaatatgagtggtttcgtttgtcctaactgtaaaggcgaatctcaaatatttaaagctaccactggtggaggtagagcattatgtgaggagctgggtataaaatttctaggttctgttccattggatccaagaataggaaaatgtgcagactttggtgaaagtttcttggacacttatccagagagcccagcatctttggctgttcttaatgttgtagaatctttgagagatgcagtaggagatttatgagtcaagctatcattattttatacattgaatatttttagaagttgacataatcaattttcctattctttttaaagggaaggtgtttcacttttgtcaaatgtcacagagaaacagtttcattaaacatcataatttaaactgttttgatattttaatagatggattgatttatagcataaggcaagtgaaacactacattcttaaaactgaataattaagtgtgttaaaagtatatctcagttgacgtgttatagacagacacattgagtataatatatattttctcttcagtagtagcaaccttaggggtatgtggattgactattattaaagttatatatattaaaataataatatgtatacatatgttaacaatcttgataataattccataatatattaataaatgaggttagcacttctatatatgcatacacatattagcttatttattcattaagcatagtctgtagccttttgtttataatgttacagcaggctggaacaattttaatatgtttattatcttcataatacttattaacattttcttgcaaagatgtaatatgctctttcttaaaatccttatttttgttgtttgatacaagctcgatgaattgggaaaatatagataattcttgggaagttttctggtactttgatggtgatattttttctaaaaagtcttttaaaatattcaaatattctgcatctttatcttgattatagcataaaagaagctttggaccaacttcactacagattaacttaccagcgttttcaaataatccacctaaaatcaaatattctatctccttgatgtaattaccgttgtatttctcgtataaagctaatgcttcataaacattcttttttggtaattttaatttttctagtatcatgtttctttcctcgggatttttccaaataaaagagatattatgatctaggatatcctgactggtttgttgcattatattattgtcatttataaataatgatacatataatgcgggcaatgcacttcccagcaattttaattgatcaatatatgataagccaatatgatcctgtaatgatttggagatactacgatgatttcgaaatattaaaatttgagttagataccagataaattgaatattgatgttagaattctttgcagtattagttgatatttgttccaataacttatcaatgttacctacttgggcatatatttcaaatattttagatattagtatatcatccgctttttcaataataaataaattgcatccaattaattcttctaaactcatttcatcaacttgaccataaaatatagccagagagaatgttggcaaccaaccatattgttcaataaaatttgtaatttgtaacttgtcattgaataattctcctgataatagctgataaacttttctaatttttggattaacagaatggccattagctttccatgatgttaattgtaattttgatagatcacggattcgaggatcattagaacctagataggaaattaaaacagctaaatgtttgttatttgttgaaatagccaatttagttgcctcgacgatatcattttttaacaaggctatgaaaatgcaatcaagcggatcacttttgtcaatatctttgttatgtaatataggtgtagtattattctttaaccatgatgataattgatcatatctcatttgttttaataaagtttctttgactgtatcattttctacttcaaaagacaattcaataccatcaaataagattgaacataatttccaaacattatacattggatcattttgtggtacaatttgcaatatatcactaaatttaagatcaaactctttaatatatggtaattgagaactgcttcttatggctacaatggaagatgcaatatgtttttgaaaaagttctcttttaatattaaacttattgccacattctgatttgggagtgtaaatggaaacacctgaaatactgtgtctatttttaataagtatgctattattaaataatatagatgaaaaatttgaagtactacctagtcgttggttctttgtgatttgtctgtatgcgtcgtgttctttattaaatttaccaaagacttttttaactgtatcctggatagacattaactctgatccatttgtaaaaatagtgtgatcacatgaacctgctaatttcaattgctccacccaattatcagaaacattcaaatcagggttagcttgtaaagcatcaaaatcttgttctgatatatctggttcatattgtttaacttgaatgatattttcattcaacatagattctgaatcttccatcaagtaatcttcatcgtttttattgctgatgctttgaaaattcatgtgttgcttaccagatccataatttgtaggataaatgtcattacaagtattttgtctacatgtgtcaatttcttgtttatcaacttcagcatcctcttcgttaataagtccccatatgctaaaatggtttactttgaaagtccaaataccaccaaatggattataagacacaaattccatgtctctcatgttttttaattttgtaatcaaaacttgtatttcatcagtcttagagacatcagttattggtttttttgtcttcttatcaataggatatattttttctaaggaaatagtagcaggaacatttaaaccgtatccgacagcaggtttgttattttggtctggataaacttcaacagttttggttgaatgaaatgtaactgtttttccaaatagttcttcttttaggtttggtacaaaagcagataagtcaacagcataattaaaagatatattaccaaagccttttcttccaataatgaaatttgatatagtctttaatttggttggtggcattttagataatgtttcaattgaaggtgaacaccaatattccgtattttcagtaactatgttatttgaattaaaattgtccttttctgataattttgaagtcttatcactttttccttcatcattatttttggtgtccagattactacattgtgcttctacttggtctttatcttttgccttcgattccacaacattatcggtaattgtttcacggggcttttcttgactgtttgatttagtgattaagggggtcccagataataatttcatttttttgattgcacttctctcagtatcgatttttaatctacgcatttcttgaacattgttatatttgttggttatcttggcaatatctttaacagtcgtaactctttggttcaatgaattattcgattttaagtactccgtggaattccaagatgaggaaaatatccctttcgtggatttaatattgttaatggtatttaatttagaatttaaattgtggaataagctagaatgagaggcattatttattggagtagtaatatttgaagttgctgaaaaagatctcttgttagtaagaataggttttttagtattttctggtctactctcttcatcagaaactttctttactgtctctacaattggagctggcatattggatatatttacagtcgtgttgcaactaacattcaaaccatagggatttaactgaagttgttgtggagctgctggttgagaagtagcagaattaccaaataaactattcacagaagtgggcttattactgaaaatattaccacctccagataaattattaccatttaaagtatttgtactagagttaccaaataaggaggaaccggtagttgaacctattgtattagtttttgataaagaggaattaccaaatagtccacctgttgtggttccagttgctgtagcggttgtaggcttagaaccaaatagtccacctggattttgtttagtagaagtactattaccaaatagaccactaggtggtgctaacgtagtattcttgttggcaatagcagaatttccaaataatccaccagttggagtgttagtaatggtagtgttagatgtagctgtgccaaaaagaccaccaggtttattctgagaagtagtactattgccaaacaatccaccacctaaagtagtagtagattgtgtagtgggtttgttcccgaataatccggtagacggacttggtgtagaagtacctaatgatgttgcattattgacattgttaaacaatccattgggtttttgtgcaaataatgaagtattattacctgttggtgcaggcgctggagtagaaaaaggagtagaactattaagcttagtattaaacatctaactaaaataaaaagatctgtttaaatagtgaaattgaaaatttttgattccattcaatttgtaaagtgacttttataaacttctaagatagagaggaagcaaaaagttttttttcgttggtttgataataattcttgaggtgagaatgggtaaataacagaccaacatatattgtccttccttttcaattttagctttttgtatattttgaatgttgttaataaataaacttttgcaatatattttttctttgttttctttttttttttctctttttttttttttcaactctcgaacatcacatttatttattaggttgataccaaaaggaaagaaaaaaaaactcaggtctaaaagaaaattgagtataagaggttggataaacaacgaaacagttgttaaggagaagaagaaagcaatttaggtaagacttaccaaagcttctcccattactataaagttggtgaaataattgtacaatgaaaataaattaaaatcagatactgttcttggataatttcatagtgttctttatttgtttttttgtttgatgtttagaaaataaatatatatatatatatgtgtgtgtgtgtgatgatagaagtgtatttttacaaagttaattaatatatatatgtatatgtgcatgtatactaaaaggctatagtgtctggtattaatgtaatcttattcttggttaaaagaggaatagcatgtttagtcttcattgtgaataagtctattaattctgttaagtttattgtctctttttctttggttgatacatagacagttagtttttcagaattaccacagacaaatgatttgaattccaataatggaatatgataaagtatgagttgattggattcgaaatgtatctgctttagttctattaaatattcattatttttatttttgtgcttttttaaatgtgtgataaatattttttgtagaaaatagaattgtcgtaatacaggaaataacattttaatgtcaattaatattgaatgtattatatctactatgggttgttgatggttatatttattttggaaatgggtgagaaaaaaaaattctaataaatttatctttaatatagtttgaaatatttgataaaaatgtctcaaaatcattcttgagttgaatttccaaactaatatccatcgataacaacggcattttcaagatcattgtatcactcataatgtttgagaaatgaattcctgttagatttccccatagatttagcttatcttttagcttaaaattagatagctgttcttcttgatattcaccaatatttgtgtcttgataattcctctttaatttgtttaaagtttcatttaagtccataacatctgctgataattgtctctttttgtttattaatgttggaagttctttgatgtcgattttatggacctctatatatctctttaatttagctaatttgattttattatctaaggagacctctttaaaattaatatcgacatcatttttatatgtaataatatcattttgtaaggattctctcaaagttgttaatttattatatacatttttatactgatccaatttttgatcaagttttgaactttttaattttaataaagtaagattttcctttaaaatgattttcacattttctaaatttgataattgccatttataccaggatttttttgcttccaaggatgaatacaatttaattatactcagttgttcttttataattcgtttttcgttatcagtagaatcatagtaccgttttaataataatggtggtgcttttgaatttgaaatttgggtttgtaaattatttaaaacattctgtgatttttcgttcatcattattaattcttttgacataaaagttatcatttgcaaccatggaatatcagagtaaagagacaaaaaggcacgaagtttattatttgttaaatcattagcactgttatttgctgctttaagtaatactggttgcgggtcaactttcatattatttatagcttgtacaaaattggattctatatcagttaaaaattttacaagagaataatttttggtagaagaattgctattatcaatattattagtagtattaagttcattaaatttaattggtgacatttgttcagcatttgatactgaaatgggtttatcatttgaagtcctttttggtgtatatgtttgattttcctcattatggttttctcttgatcttttagaacttttactatagacatccttattattagcggtattattaattgtacttttgttattattattgttgttgtttttattatatgtaaaatgtgaagaaatgttggttaaatccatgtcactatcactttcggattcattataattactatgattattattgttattattattattctgtaagtgtatctgagtaaattctatttcattttcagttaagttttgttcattttcatcaaaattatcgatatttgttttacttgaattagaatggtatggttgagttaattccattttgtttccattatcgcttaattgtgcttgatcattcttctttccatttatctgtgtgaaatccatttcttcattctgactacttattatctgattcaatgatgccattgtgttcgttttattaatattacttttatagatctgagtaaaatccattgaatctctatcagcttcaagaaatttatgtggggtatgttttggaatctgtgttaactccatgtcttcaggatcattcgttttacttacaaatgggatcttagtaaagttcattgtatcagagttattattattattaataatgttagagatattttctgaattaaaaacttctgtcaattccatagtactatcatttttattaacaaaattatcatcttgcatactaatggataaaggaattggggacattttttcctccctttcgattgtatcagcactgatgtcacttgtattattatttgtattgtggtttttattcggtaaattgattggacccgtcaattccatactcagagaatcttcatctttttcttgagatgatatatcaagaactggtttaatcttaacaggtatcattaaagccgtatcattcttagttgtagtagacgtagtgatattagtattgttcgtatttttattaataacaaaatcaaaactatgcaatgtaacatctggagcaaaggaaactgttctattggatttatctaataatgtctgagtaatagaggtcaaatcatggttatcattttgatcaaactgatcaggaacagcagatcgttgatttgtccttgactgtgaagtgtttgataagacatctggatcattggttatagtattttttaagatgcttttttttggtagattagaaattgaagattgttgtgttgatgtggactctttttttatattgtcccattgactgttattactactcatatggtaatttgtaatggtaatttcctttatttttcgtatatcttattattatattccaatcagttgtatgtatttaatactggaaaaagaaaaaaaatagaataaaaaaagagagaaagggagggaaggggagggaggacattgttccagcatgtttgaggatatgaataaggtgtgtgtagtttatgtttatctgagtgtctcatatattgctaaaacaagcttattgatgtcatttccagattttaggattgtctgtttgtcctctttcaaatccaaaaccctagggttggttaatcccaaaaaaaaaaaaatcaaaaaattaagtaaagggaaatttgaaaggcgttcgaaccccgaggtgtgccaaatatttttctctcaattctaccgtttttctgcttattttttttggttcgagaaaaagtaagcgattgcctaatccaagggttgttattactgttatgtctttcaatatggaggtttttattgtaacaataaatgtctgttttttgatactgagggaatattctgtcaacttgtgtatgtgtatatgtatgtgtgtacatgtatctgtacatatagatacgtttgttacacatggaaagattccttgatagaaaaatataagagttaatatatatctgttatctccctttattttaccttttatttttctttttttaacattgttttactacctgacattcttttttattgctttacgtgaaagggtcaaatcaaattagattaaaaaaatacaggttaaatgagagtatatattatatactcatttgtttgtttgtttaacagttgaatatattttattatacatagattatattccacttcgaattttatttgttgcgtttcgttgcgtttatctttttttttaatttttttaatcatttgtttatctatttaatacaggtataagaaatagagttaagggtagagttgagtatactgatttgcatccgtttctttattatctttgattttttttttgtggttcttatttccaatatacttagcaatcacagtgttggcattaaaataaaagacatgaataattggcaacacttgtttaacaatacagatagcatagtaagccatattaacaaaccatatttaaggtacgataaccgtgaaaaaaatgtatccagcatagtatttgatcaatttgccaatttactttgggctggggacacttatggttgtgtctcttcttatgatccaaatttacaattatatacgaggtatagaggtcacattggtggttcctccgtgaaaagtattgtgcctctaagagagggtatcctatcattaagtgaagatgctttacatctatctaatagaagaggcgttactatatttaacgtaaccagtataaatatcgctgaatttagtgaattacaaaccatgtgtcctatgtctattgataaccatgattatatttattgtgcaggtaataatacatcggtagggatcacctgtcttgatttaaacaaggttaaattgacaagtatcataaactataatgcaaaagttaaattattgaagtctgcaagaaacttattgcttatcgggaaaccttcaggtgcaatagatcttttggactctagatcaaatcaactaattaaatcttttatttgtcattcagacacaatcacatcaatggacattgcagattttactttagtaacaacagggaagtcaagatcctcctataattcctttgctgatccattcgttaatgtgtttgatttaagatctatgaaacagttggcaccggtttcgttctcaaaggacagtaatacgggcgtggaaggtgcatcatttgtacagctacatcctgtgttacccactgttatgtttgttggttctaaatctggtgatttcgattttgttgatttgtcaaatccaataataagaacccaatatattcacccaggtaaagacattaagtccatggttttatctccgagtggggaccacatagctgtattggaaaacgataatattctaagtacatggtcaagatcacctcacggcggtaatttcactaatacacctgaaattttacagtacccagatttcgttgatgatggtccacctaattttgtgtctgttgataacatggattttcccttgagtagcgtcggtttaccttattataatgaacgattattatctgcttggccatacactcttttcaatagtgatgggtctattccaaagataatcaatacaaatttatcattggcacatataccaaaaaataacaagctactgtctttaaatagtacatctttaaatcattcctcgaaaaagttcccattctataggtatgataaaaataagtatggaagaagaaatgtagctacaagatatgtttgtatgagagatttgaggaaaaacatcttgactggtaatgttgataaagaagagattctgaattataaagggtctggtaagaatataccatcagcatatagccaattgccctttacgtatggtaagtatggttcgaataattttgattttcaatcttacaacaagacaaagtattcaggacttgacacagatgttgataattcttacacaaattcaatcattcaattgtatcggtttgttccggaagtttttaacttttcagtgtgttgtttaaaagatgaaaattttgagaaaccatcactattatctgagttgggatacctatatgatatgatgagtagatccaatggggtagtctgcagatctgcaaattttcaaagtgtattaaattcaattcctcaagcttctaaattaggattattggataataatataaatgaattatctgaaatgaactataactctattttagaaactttaagtactaataataatagtgatagtggtaataatagtaatgatagttcatcacaaaacgatttcttgtctaaaagtgtcatacaaaaattcaatgagtttttactaaatcgattgttaaaggaagaatttgaaagtactggccataatataacattggaacaatgttttgggcttacagtatctactgaaatcaaacccaaatgtaatcattacaataaggtgaccaatgtggaggcatgtttaactctccaatccccaattagaaatggtgttaaacaacaccctaaaaaaataaataatcaaactattctaccatacattgaatcatctatgagaaatattaaaatgcaaaagagagtctgtgaaacgtgcggtaaacatgacatggtagaggttgaaaaaacggtcaataatttgccaccactaatgtctcttcaagttatgttgtctatatcagaatggaaaactgttagaactgttaaaaagtggctgtcaaaagaattctttgcagccatttataaaaataaaattataattaaaccttcatatcaagatttaaaaatgccaggcgaagtattcaaatatgaattaaatggatatgttgctagagtgacagacccatctacaaattcatctcgattagtgacatatgcacgtgtttgggatcatgaacaacaaaattttaaatggtatatgtttaacaactatctagttgtggaaatcagtgaggaggaagcatttaacgtttcgtactggtggaagagtatagaagttattctttactgtgatagtgaagaaataagaaaaccttttttttctataaacacatattctttaaattatgatattctttacaaagatcatttttctaatggaattagagaaggttataagaaacaatataaattattaacgaggactgaagctcctaaagaaggtactttgattgcgatagacgcggaatttgttttattgaaggaggaattatgtgatattgattgtcaaggtacaaaaacaattgtaagacctaaaaaatcttctttagcaagaatttcagtaatcagaggggaagaaggacccttatatggtattccatttattgatgattatattgtcaataaagaccatgtggaggattatttaaccaaatatagtggtattatgccaggtgatttagatatagagaaaagtcataaaccattagtctcgagggaagtagcatatagaaagatttggttattaatgcaaattggttgtatttttgtgggtcatggattaagtaatgattttaaattgataaatattaatgtccctaaagagcaaatcagagatacagcagtatattttttgcaaggaaagagatatttatcacttaaatacttagcattcacattattaggcaaaaatgttcaacaagataatcatgattctattgaagatgcatacacagcattgattctttacaagaaatatttagatatcaaagagactggtaatttaccaaaagttattgagacattgtatgaggaaggaagagcctcaaattataaagttccagaacctgtatcttcacagacaaagaattagatatgatagtctttaatcataacatattgataaatataaataaattacaataagtaatagaaactgtgatgattaaatacaccattacaacaataagtatgcagtcgtatatagattcgtataataataattaagtattatagagttttattattagtaatgaataagaagttaaagaattaaaatatctatatttaacaaaaaaggataaatagatgtataaacgagtagagatatttgaaagaattttttgtttcgcaaaatagacaattagcactattagttgatatgttactttatgaggtctcgatatatgctgagcaaaagatgccccatttactacataactatctctgctaatattttcattaatacgaggctgctttaatatgaaaatatcaattaccttcaacaatcttaacaacgaaaattattgttgttttgaataaagaccctatcagaatgccatctctttatttattatgcgggatggtgatattccgctccaaagccgtcgatttttaattttgttcacaacctacaacgaagttttttttttttgtttgcctctatttttggtagaattagaggaagatataatgtgaaaagataaggaataaatattttagataaatgatggatattattagttgaataaatgtttgaaacttatgtaacttaaatatgaatgggatagaaattattgggcttaccagaaactgagggttgtattattttctgtcatagtagtttttttgtttggatatatctcacattagtcacacaaagcaaagatagaaaaatataattatataatgtctcttgctgaatttgatgaattgaaatgggaccattccgtgaagagattggataccccatcgcattatctgttaaggaaagcaagaaaaacacctcgtgggttagaagaattaagaaaatctatcgatagtgctaccatatacgttggtaatttatcattttatacttcagaggaacaaatctatgaattatttagcaaatgtggtacaatcaaaagaattattatgggtttagatagatttaagtttacaccatgtggattttgttttgtcatctatgaaacggttcaagaagcacgtaatgcattgaaatatctaagtggtacaaaattagatgaaaaagttttaactattgatatggatcctggttttgaagacggtagacaatttggtagaggtaaaagtggtggtcaagtgagtgatgaaatgagatttgaatttgatgcagctagaggtggatttggtattccattagaagaaagaattagttggggacaatatccacaacaaaggttttcccgtccacaaaatcatcatttcaataaccgtcatcgtccaattcgtcgtcctgtaggtagtagatttaagaataggcatatatcaaataatgctgattataataataatatgaatcaatatgttagcaataataatattgatacacaaaacactataacaaccacacaggagcaagaagaagataactatattccacaatgaaaaagagtaaagttgagtagtgatgtaatatatatatatatatatgggtgcatataaacaacagattaaataatagtttatacagttgttttactttttcagcttggttatatcaataagaaattcaataaaagaaaaacttggatctaaagggagtacaattagatagtaattctttgttataaatatgatgttattttggtttcttttactgcttaaaataaaaatatatcataaacaagcttaaagatagaaggcacataaaaacttttatgaatgtataatataaatgttctattcctatgtatgtataataagtagttaccatatacatatataaaaatatatgtgcaagtatatatgtgatacgatgagtaggaaaaaatatgcttatgtatttaaaagatatctatatcatgatgtaatttttgtattagcgttattgtgaggatggcggtgaattgacttagtattaccatgattatggtttgcttgatctacaaagactttacgtcttctgacattgataaaccaatttgataattgtactttagttaagccagtttgttctagtaattctaatttttcctctggtgaaggatatggatcatgcaaatggctcaataaccaactatttagtatttcaactgtctttttaggtagattagatctctttgttgaggttttctttgtgactttattagtaccaatcatttgcttagatgttttgtttgtatcaatgttctcgttattgttgttactatttctattattacttttagcagtctttctgttgaacatatcagcgctcgacttgttatctttattgattttcacgtgtatcaaagatccacccatggaaggagagttaggtatactttgaaaaccaagttgacctgcaacttgtttgttatccatgatagatggacttgacacaggatatgatagcggagatgttggaggggatgtttttaatctattagaattattatttgaagtgactatgtttgcagaaaaccgttgttgtgggttactgtacatattattataatatttgatggatgttgtatagtttttattattatgtattaaatgcgatatttcattgatagatgcattgggttttgtagtaaacacattattaaaatttcttgtggaaggaactggagaaggaaatggtggcatagtattggggacagattgataaagatggttgcttgaagcaggagacggtggtagaagcacatctctttttggatagcggtatgatggttgtggagtaacaaacctagatgcagcagataactcatctagagcattattagaactatttctgttgtttgataaatcattatttataatattgaatatgttttggattgatggtaattcgactctttgattttgatagttcatgttattgtaatatatcaaacgctattatataatatagaaagacacttaatttgctactagatatgcagtagtgttgaattagagaatatggtgatatggaattaaacaacaaatgaattttagcgaataggtatttgtacaaaggtataaaatggaaagtggacctgagaaccttttagttgtatcttgcagaaaagtcttttgtatatatatcttgtttgttgttatatttgtgtttcaaacacgctcgagtgttggttgaagagacgatcgtgaaatcgcttggaaacagaagagaactgaagtcaatagatatttgattttcgggaagactctcgaaattgtcatttttttttacacgcacacatatatatatatagttgtaggtagataataaggatagatcatattattggtatgcattgttgaggtgtcaacccgttaaagaatggaggctggaaaacagaagggaaatggagttaaatgacataaagagaaaagcattactcagattgatgctatatcgcatactttagctattgtattgagttagaaagacagccaaataatcggagatgactacataatagtgaagaaggacaaggaaaatcatagattatctccgtgttcatgcacgtttctttcgaccaattatttagtttaagacaacattttctgcactagtattgtttagaacaacaatggaaaaaatcgaaaaaaatagaaggaatcggacaaatatgaataatgaaaccaattcaaaagccgtaggcaaataatagaagaatgtaacatgacatacttgtttttccttaaacatacctttcccaagattgttggaccaatgaggggttaataaatcacttgtttgtctctttttttcaaaaaaatgggggaattcattaagatgaaaaatactataggctggctattcttccattgtttttcttttttcctattgttttgtcggttttttctttttttttattttgattcgagatcacaaaatgttcaatgatgttagcatattggtaaactattaatttatcaggtattttttatcattatgaaaaacaacacatttcttcaaaatgaaggtgtctctttgtacagattattttggattttgccggaagttgttggagatttaagatgaaaattttgtaggtacttttttttacagtgaagctaggggtttgcatctgtttatgatatttaacgagatagtaataggaaaaagtagtgaccaaccttttccaaaaaaagatcttaccgaaattgcttttttttttacaaaacaatagaaaccagaaaaataatcttatttttttttccttttttttgacagtgtgttttgtttgtcgattggacaaaaataatataatagaaaaaaaaattgaaatttaaaaatatttgaacaaaagaaaaaatcttaaaactttattttttccagatcttagaaaatatcggattaaaaataaagttatgataaaaaattttttgtcattgagaaagttcttcataaaaataataattttctgtgcttaatgaactaaacaatacaacaaaaaataaaatcaaatttggtagttgcagtatttttgttagagaaaaaaaaaaataaaagaaaaaataaacaaaataatagaggtattaaagtgtatttgttttgtctatgtggagttgagattgtaatctctcctaaaaattatattttgttttttttttttttggggaggggggaatatgccaattaagtcccttttatttttactctgattttttttgttaaatagacctatattaatattgggaagaagtggggaaactaaagtaaaacaactctcagcacagagttaaccctacttaatttattactgttgaaagtttcgaactttctataaaattatattatagagaatttcacaacagtatattcttacttaaaatctatataaagtatacaaaaactatattagaaatttatctgaaaaaaaaagttataatacaaatggtttctaatcttgtttattatttattcaatttcattaaaggttgaggtttttttttagttttacagagaacattaaagaagagattactttttttttgctattcaacaaaatctctcaacgatgagtatattagtgtctctttatcactctctttcttaaatggtttttttagtcttttaggtttaatatttaattaccatcgtttattgatgcagtattagagacatttatcgttagatatccttatatatatctatatagtataagttagccctaaatataaatatatagtacaaacagtactgttgcattataccctaacttaacaaagtttttctggttaaaaaaaactccttgaagataagcaattgccgtgttaaatgactttatagatatttttaaggagatattatgatctttaatatgctatactaacataaacaatatgagttcgagaattttgttgtatttgacaaatttctagaaaaaaagattttatttattttactataatctattttttataatattaagataattgaaatgtttttaatagttaaaatctactgctattaaaccgtggtgctaaaatgagcaccccttacattcgtgatgatgtaaaatagttatgtaacacagtgtaaaaggtatgatttaattgcataccagttttgtacactaaattataatattatattatttccaaaataagggtttcattcattgtagaagaaggagagaaggtgtaacttcgaaatgaagctatgatacacgaaagatttgttttattcatatggacagcaaaatgtattttactttttttttcaaggagaagataccagatgtgttaaaataaaaataaaattgaaaattagacaaaattacacgtgggcatttccgtttgcggactgtcagagtctagacatttagattatatcatcacggaaatctggtaaaattattaaaacgtcaaacgcaagatcgcatgggggaaaaaaaatcacacaatttgaaaagcttttatcggaagaaaatataatgtcggctattgaagaaaaaaaaaagatttattaagtttgaaaaatgctgtttacatcactattacaaattatattgtttaatcttgagaatgtgtgacaacatcattcttgaattttcgactatacgaaacaatgacacaattgtttctagaaatgtgtaatctattaattttaaacaatacatattttttgacgtgcaaacaaggtgctatttattcattaatgccaacttgtttgttttttcttttttagttttttttttttttcagaatttgttaacaatcttggaagttttaagatgagacaatagtcttaattacgagagtcgatttatgaaattagtgtagatttttttttcttttgtctaaagacatatagatattcttggaatattggacatctaaaactgtgctttatcgttttgaattgtttgtagagtgttgtcatcttgtcatctttccgtatattactaatatctgaggacaaatggaaggatccactacactcactgggttgatttttttcttacatcaagttaacctgaattgttcacttgatgctaagtgcaaataataaatgaacggttttgcatatctcatattttcatacttccttgctttagtaaattgtttgtcttttgatagttgctgaactttgtgtgaatatttagtgttatttggatgagtattatgtaatctcaactgaatctaaaatgtgttctattttttttagttagacacattagatcaaacaatggagatggaactataaaatttatattcttggaattcactattattagccattgccaagaattatttaaccaaattacgtatttgtaattacgaacactcttatctttagcatactgaaaactataaaatagaatatctaaaaaaagaagagaaacaaaagaagaatatttgattaaaattatgacatttcccgctttattgttgataggaaattagtttgtaatattgttcaaagataaggcacgctattcctgactggtttattcatttttaaaattaactttacaaagttcatattttatttttgatctttttatcatcaatgctcatattaataatgtctttattatgtatagtaagcaaaaaaaaacttgggcattttatttgtcaataatacaaaattgtggtaagtatcttttaataagaaacagtataatatatgttagcttctttaaagccatattattaatgtcacttttatgacatgatcttactggatttttttgcattaaattgtgttctgtatatgtgagaagaattatttacaataaagatatatcgaatataacaactttgatttgtatcataagataaaaaaaaaaaaagcgagtgtagatcatttagttaccgaattgtctaattaatagtatggttaaccgacctactggatttggttctttttttgtattattgttattaatttcaatctttatgcgttcaaagttaagaggattttcggtcagtggtagtcatgttttctaatgacaatgatcatggtcataataatacataataatacatgtataaacttatatataattaatatctttgggttaaacgtggaaaaaaagaataggaaaggggatatcaaaaaatcaaattgctcaatcacccatttcgcttgctctcttttctgcatcttcttcagataacttgacaccacctatgacagaaaactgaccaccacaaccagccagtataatattcctatcttgagtggcggtatttttgattcttgttggaacttcaacatcttcaccggcagggcctaaacctactgcatatgtttcaccaaacccccatgaatagcaaataccgtttgtggcaactgctaaggaatgatgggaacctgctgctactgtcttaaatttaggtaaatcaactaattttgttggaataggaaccgaacgagcttttccatgttcatccttatatgtattttcttcaggtaacttatccttggaaataccaacttcacacatatctaatctaccaaatgcatatatttctccatcttgagtgagaattaatgagtgatgctcacctgcctggatcattttaatatttaaagttggatcaattttgactttagttggttttatgacaagggcaccatcttcaacgttcttagatataccacattgaccgaattgatttagtccccaactaacgacggtcccatctttcttgacagcaaaacagtggttttcaccgctggcaatgtatttgatatgtcttagaccgaatggtcttgggtccaaagtattcagacgatatctttccattacttttctccctagttggtattgttgaccattaccccaagcaaaaacaataccttcctcatctaaaaataatatatgatctttaccccccgccatttgaacaatttgatatttggaaaaatttggaactttccaaggagttctttgaatcttaatcttatcttgataaaatccaagaataccctcgttacaacggaatgtaccccacgcataaatatcaccgttgctgaaaagagcacaacttagattatcagttgcagttaattgcacaactttatgaccttctgccaatggtgggaataaagatctatccaatttgtgtggggtggattctagctcatttaagtcaccatcttcatcatcactgtcgctgttattagcatccatatcctttaaaacttctttggcaccacttgtatctctacctaatgcaccgacatcgttgcaaccccacgaccagatatcctgatttgaatctagagcaatagtgtgcataccacccacagcaaatgagataatctttgcttcatcgactggtaaaaatggattcaatcttggtcttttcacttctttatttttggctaatggacctaaacccaattcacacattgaaccagtaccaaaacagaaaatatctaatggttgaacagaaatatagagatgtttgtagtcatcaatagtgttaatgatgtgggctgcatgtgttttggaagaatgtttgacagccttttttttatggtcaagttcattgttagccataacagagtcgtcctcagtagccgatcttttagacattattgtaaatatatttcttgttttatgtggttctttacaaggttatagtacagtgactcgttgaaaagaacttttctagtatcagattaagaaccttgcagtgatgatttatttattactacagtgttagttatctctggttactattttttatatttttcttttacatacatcatagacaacgatcttatttttccgtttttgttctcttttttctttttctagctcgactctagatttcctgtcgttgatagcgactttcctcaaacagtcccatctcatgagaaattgaatgatgataaattaacattggatctgtctgtcagagggtgggtaagttcatgcttaaagctatgtcaccattacgaatgaacaacttgtggaaatttcccaatacactattactttatggtgtattgttgagcatcgactaccaatttatttttactaggaggatttgagtcccttgggtggatcttacttgttcatagaattgtaggttttattgatggaggaagaattggttgcatgaatgggttttcctgttgtgggtattgagtctctatgtgtcgttgaagtagtactaaaaactttgggtcttgtagaaataactattttatttgtctctcgagaagagtctgatccattaataacaagataatttgacttagaggatgcttctgtaattaactgagaggtgaagggcttaggagatgtatgtggcttagaaacattttgacttatttttgattgtgagtctctctttaggagggatattctgattacccgaggtagagggactagaattaacaactgttagtctagaagaagataccagcgatgttgatgctgatgaggtcggaggtaagttattgttatttggtgttcttggtgccagtggtaaattataagtgcgttgagctttatggtcagttactgaagctatatttgatgtagtaaatgattttttattggcagatacacatttttgaggcaaaaaacctggtccattactcacagcctgcgttgaatttatttggggggaacttgcagtggttgtactgactcctatcttagaattgtttttaataatttctaatggtgtttttattgcttcccttttagcattcatttccgatttgggttgtggtgataagggtagtgcagtaattgcattctgtttgtttgacatcggtttttgttcattatcgatacttagtaaggatgtagtattcgaaataggtgtcttcgtaaccatattagttgtagagatggtattactcttttctaaagatttaagatgatcaacattgatctgtgcttttattgttgttgtcttgttagtcgagattgatacatttacctgactacttatagtgctgctctcaatatttgcagtggtattggctttattagaggtagatgtgtcataagctgtattcttacttgcaaatgaattcatatgatttgtagatatactattattagtttgttgttttgtgtatttggttgtgtctgtcgttttatttgtagatgtggtgacactaatcccttgttgttcaggtatttgtgtttttatcgaaggagattcatttgtttttttaacattttcaatagaactttgtgacagttgaggagatttagtagatgagatagctgttggctctttcttattaatttttttttctgatgatatatcacacatagtgctgtctttagaagtttctccgcttgtttgtacaataacaggtttggttgtcgttggcacctggattttcaatatagatgtgttaatattcgatgaagagtcatttttattaatggttaatgtattactagccaatgatggattcttcatatcgccctttatctgtatttttctgttggcattgatggaatcatttgtgattttattatttaattttgtgaaaaaatctatacgtggatttgtttcagtagttgttgttgtatttgtgttggatcctggaacattttgattattattactcatatttggattttgtttcctattaaattctttcgaagagattttatcaacattaaaattatttgtggtgacaactaatgttttttctgttactaattttttagtatcatttgttgaaatttcattttttgtattttcatttattgttgttttagaagcgtttattgatatggcttttatggttttgtctattgggctttttttatttgccataatggagttggttgaagttggcaattgtgctgtttttgatgcatctacaagaatattatttctattcattatatctacaatcttattaataacatatacatatggtttggatttccacgagtttatttcattataatactggggtggacaatactttataaattcatttgttaaaatttgttgtttcctatgaatggttgaattataaactgcacaatggtactcatctaaagattcaatccatttttttagttggacttttgattttaaaatatcaacggtgatactttgaaattttttcttaaagaattggggtaattttgcataatatggacacatttttgatttaatagcttcccaataattgtaggcagatgcagattctggtaaattataatcagggtatgctattttaagaacatgtttaaataaaaatgaatcttctgcttcatggaggggtgtaatatcatgatgtgacattttgttaatatcatatttcaataatgtagaaaaatgttcagattctagtaactttataaattgataggcccattttaaaaatgattctccattttttacgtcaactaacttattgattagaggtaaaatcctaggtattaatgtcttgatccaatgtttttcaacttcctttttattgaaagtactgaagtttaatgttctaactaagacttcttgatttgcatgcatattaaaccagaattgttttaccctatttttatctaatattgggtcgattaatttcttgattgttgaagtagaacgcttctttttagtaaactctgagtctaattgtttttctaaagtaggtcttttcatattcctcaactcgatatcagttgactcaaacggcctctttttatttctattttcttctaatgaaccacgtcttctggcatcgctaaccattgcattattgcacgcaagagagaaatctttttcattattttgcttcgatctttggacttttaatagttttgaaaaaattgcagccccaatagataatgctgtattcaagctaggacgagttttccacattgttagggttttactatattcaccattactataatgtgaaatgcaataactgacagcacgaacaggatcaaaatgcaagatgtttgtgagtaaactaaaggcaggtcttaatttttccaaccaaagtttgatttttttctctgaagttaagtcttctaatggaggcgtccttaattgatgtaatttagcatatgaatcggcgcccaatatttttttcttaatattcttataatatactgaagaatcagggtctttagcgtctagatattttgggaaaagtaatgctagtacatagttacatataaatttattttctaaatcatggaatggagttgaaccagttactttattatgtttatgtgtcagaatagtgaaatggtgcttttgtaaaaattccaaaaaatttatgttccatgtttctaagggatattcattaagttccttttttaattgttttaattctagtagagtttcccttagccattcctttagcacagcatcagtatttaacgttgaaaaatctgtaatatggtttgattttatcatagattctcgaaggttagcccaagcaagtaggtcactttttgattcattttctctgatgctttcattttgcatgatgtcatttattttttttaatccattatcattatcaatttctgtaaaagtatttttattttttttagtttcttgtatagtttcatgaatagaagtagtgatagaagttggattgccgaaagtgaaagaagtggtatcatctatacgttgagaatctgtattgttttctgttacttgggataaagtataagttgaaataggttctaattgaatagcagttttatttatactagatggtttttcagtagttttgtttggaatattatcagaattgttatctggatttaaattatctggtttaatcacagttgctattttcgtacttttcgttatcttcttaacaaccaaattattttttgaggaattatcatttttaaaatcagatctcttttttgtttctatctcaggtttcatgaatttaatattattactattagtagtcatagtagtagttttcgttgtggttgtggtggcagcagtgttatctaattgtaaaatatttttaaattcttcaccagatatgggtccaaaagatttaggagaattatgttcagctaatatatgttttatagagttgataaaagttgatgcactaatacaatatgatcgcatgttatcatttaattgtgccactgtattactatctaatggtagaagcacaaaattgttcgcatttctaataatatatcttgcaaacgatatctcatcattgaattgagggtctgatttctcttttgttgacatatttactagcaaacctcagcgtgacaatctgcaataactatattgtaagataaatatgtatatgcgtgtgtgtgtgtgtttaatggtacaatagataaagttataaatcaaatggaagaacaaatattaaggtaatatttgattggtacaataggtttgtcctatgcgaaccctttttttactgaatataaattaattgagtctatagatgaaatggtactaataccagtttacaaaaatatctctgtctttatctagataggttatactgcatttacagcaatcgtactaaagcttcttagattagatgttcttttgtactaactttttttttaattttgtggctgtcactgtgaagtaataagatgccgaaataaaagtaaaaaacaaaaaaactaagaagaaaatgtgacatgatgtgatgtgatgagtattctctatatgggtagatatgtgtatttaagaatatatacatatatatatatgtataggtataggtatataggtatgtatgtgtgtgtgttacaatgcagggaataatttaattattataaaagtaactactaaaccaatgatcataaatagagtcgttgtgagataaaagatccagcccaatttagttttattataatgtttcaatttcccactaacatcagagatccccttcgatgccacttgtataccaatttcagcagcacctaatatcttctgatcttcatccaacgcagtttggaatgctatagccccatcttttaaactagatactaactttgacatatcttgaatcaaatcttcttgtatattttcatggttttgtaattgtttttcaacagacacagaattgtttgaatccatattattattttcaactagactcttgcttcttttctttccccccagtaatctttttcttaattgttgaatttcatattcttcctcatcttttctctctttgtatatttcattcatattatcattgtcattcgtggtgaaattactagtgttatctaactcatttaatggattgtcaaaatcaacactatattttctagtctttaaactattttcataattttcatattgtgaccgaattaattgcagggtcttgaaatttatatttgagcttttaatctctaatgaacccaactgatcctggtattcattcaatactgatccatttaatgagtcaagactatatttaattgactctttcttacatatatttaaattatttgtgaatttgttgtttagtatatttagtagaaagagactataagtattattattattttttgatgtagaagtagtgtttttttgttgttcaatttcttcaaactgttttttcagttgttctaagttggcaatcgtagtggtggtggcaatggctgacattactatcggattaaaagatatataatatagaatgtgtctttcccgtttattttctgtctatcaggtagtatcaaaaaaagagtatacacagtatacatataccattcacctccctatctagccacatacatatatatatatgaatacggatatagatacatatgtgtatttgtatgtttatgcgtttagttgcagagccatgtggggatattacaattagtattatcggaacgaatttttttcctttctctttagagaccaaaaattaaagaaaatgtgaagaaattgcataaaaaaccaagaacatttatataacagacagtgacaaagacaagacagagccaaaggaatgaaagaaaactattagagactagcagactgactgggcaggtctatataataacctgatcttgtgttgtgttatgtgattcgtaatagcggtacaaatactagcaatatggtccaatctgcatcttttgctacttgtttttttgtttattttattctttaacacattaagtatgttgtaattacgattccaagtttggtaagctggaaaaagaaagagtgtgtatattgtgatgatagaaaaatcaagtcaaatatgttttatcaagtttgtgttgccttctaactccaataggtatgtactgtaaaaattgtataattttgtttaatctatgatagatggataaatattaggaaactaagctatctttagatcttcttgtattatctatttggtcgttccttatgtatttacatatgttatgcttgtaatataacattattatataatttcccagatttctataaacgatcatcttgtttgatcaattcatcatgtagtgctttactccactttgactataatgtctaattttttttttttgtaaagatcatttttaaccgaaagaaaacttttcagcattatcataaaatgacagtataaaagagataagaattcaacccaacttgaaatttattcttgccttcctttttaagttacctttctaagtggatccatagacaattttgaagggtggactcatactatataattgttcaaacaagcatttaaaaaaaggtaaataaagagaaagagagagaggctctctgtgtgtgtgtgcaatagatatattccttttctgccagagattttgttcgctagatatatatgcatataatattttaaaataattatgactgctgacgaaacatattggcaaaacttgaaaccatttcaagaaggctcatcgatatcaaatcaagaatcacgtaaacaaaaatatttagttcattataataaagataataatactggtgataacaacaccaatagtgttgaatcatttagaaaattacaagatctagataatactaaacaaaggtttaggcagctattatctctatcggatttgtttagacattttattggtgttaaagcaaacaaggatcccaactttaaaaaaattttagatgacttagattcagatattaataatagggataacaagaataagaaaaaggtgaatagaagaaaaagtgaaaaggaggaagatgctgaattgttgagagaagaggaaaataatgagtttttgccagatgaatataatggtgacgatggtgatacaaatcaaatggaatttcaatttagagattccccattatatatcaatggtaaattaagaccatatcaaattcagggtctaaattggttaattcaattacattctaataaattagcagggattcttgctgatgaaatgggattgggtaaaactttacagactatttcatttttaggttatttaaggtacattgagaaaaaatgtggtccatttttagtcattgcaccaaaatcaactttaaacaattggaaaagagagattaacaaatggacacctgaagttaatgtttttgtcttacaaggtgataaagatgaaagagccatgatgattaaagataaattattggcatgtgacttcgatatagtcattgcttcatatgaaattgtgattaaagaaaaatcatctttcaaaaaatttgattgggaatatattgttatcgatgaagcccatagaattaagaatgaggaatcaatgttgtctcaggtactgagagactttacatccagaaacagattattgattacagggactccactacaaaataatttgcatgaattatggtccctattaaatttcttgttacctgatatcttttccagttcacaggcttttgatgattggttttcatcagatacatcagaagaagataaacataaaattgttaaacaattacgtacaattttacaaccatttttattacgccgtattaaaagtgatgtggagacctcattgttgccaaagaaagaaataaatctatacgtaggaatgtcctccatgcaaaagaaatggtacaaacaaatcttagaaagagatattgatgctgttaatggtgctaatgggaataaggaatctaagacacgactattaaatattgtcatgcaacttagaaaatgttgcaatcatccatatctatttgatggtgcagaaccaggccctccttacactacagatgaacatttaatctttaattcagcaaaattaaaagtcctagatagattattgaaaaaattgaaagaagaagggtctcgtgtattaatttttagccaaatgtcaagattattagacattctagaagattattgctacttcagaggctacaaatattgcaggattgacggatctacagatcatgaagatcgtattcgatttattgatgaatataatgctccaggttctgataaattcatatttttgttaactacacgtgctggtggcttaggtatcaatcttacctcagcagatgtcgttatattgtatgattcagattggaatccacaagctgatttacaagcaatggatagagcacatagaattggtcaaaagaaacaagtgaaagtatttagattggttacagaaaattcggtagaagacaaaattgtagagagggctacccaaaagttaaaattggatcaattggttatacaaaaaaataatggatttggtaaaaagaaagaaaataaaggtgaaagtaaagattctttattatctatgattcaacatggtgctgcagatgtttttaaaaatgatggtaaaaataaagagaacacctcttcttccactactaatactactactaatcagtcaaataacaatacggaaaatacgcataaaaataatagtgttaataataatacaattgatgaaatgaatactgatcctgatcttgaagttgatttagatcaactattaagtgcatcagaagataaaactaagatactgaacgctaagtatgaaaagttaggcttagatgatttacaaaaattcaatcaagattctgcatatgaatggaatggtacggattttaagaaacaacaaattcaaaaggatattatagatccaaactggttacactctacgatttcaaagcgtgaacgtactcaaaactattcatatgatgtggataactattataagggtgttttaaaccccaaaaagacaccagcaccattacaaccaagaatgcctaaacctcgtcagttcaatagtcatcaattgatgaatgtaggtttgaaggatttgtatgagaaagagcgttactggattgctaaaaagacagcatacacaccaacagttgaagatataaaagttacatatggtaaccaattatcagagagtgaaatcaatgaaaaattaaaagaaatgaaattagcaattagtaaagctgaacctttaaccccagaggaagagaaattaaaaatccaatgggaaagtgagggttttagtaaatggaataaaatagaatttagaaaatttatttcattatcaggtaaatatggtagaaattccattcaggcaattgcatcagagttggccccaggtaaaacattagaggaagttaaagcatatgctaaagctttctgggcaaattatgaacgggttgacgatcatgaaaaaataataaaaatgattgaagcagatgaagaaaagctgagaaaagtacaatatcaaaaggatattctgaagcttaaaatcagtgattataaaaatccattttttgaattaagattaaaacatccaccatccactaataacaaaagaattttttcgaaagaagaggatcgattcatattacttacattaaataaatatggtctggatagagaagatattaatgaattaatacgagatgaaattagagattgtccattgtttgaattagacttctttttccaaagcagaacactgcttgagattgggaggagggtatatacactaattcagtgtttagaaagggaatttcaactaaaagatggaaagataataagagtagaggaaaaaccaaaaaagaaaatgataaatactgatgctaacagtaactgtaaagataaaaaatcgcctggtgcttcccctgatactctaagtattacagcaaaggttgaaaatgatagagatgacgaaattgaacgttcagataaaagatcttctgaaaaacttgatgaagtgaatgttaaagatgatgttgatactgtgattattccagaaaatgatgctgtgccaaattatgaaggtcatcaagaaaagaaaatgagaatagaatagaattatgtataccgaactggtatttatatgtggcataagattgtatatatatcacatgaaaataaaatgagttaataaaaatatatgggcgcttgattttcattatggtagacagtacttgagatctaagctaatggagagtatattatttgacccggattgaatatttgtgtgggtaacgttaagaatcttggatttgcaatattattaggaggaagttaataaggtcgtgcatcgtctaaataataatgagtaatgtcctatcagcttccattactgcatgtattatttcatagggttgaaagaccttttaaattagttgtaaaaatttgcttttagcttatttatttctttaaagatatacgaataatgctatgaaaaacctataagttattttaaaagggagtatacaaattagagagtatggtattgacaaggtatggatattaaatactgttgatatcatatgaattaatattggtataaagaggaaagctttgaagtattaggttggatattgcagcaaaattcagaaaaagtaatgggattgttagataaacgttctggtgtccttaatacttattgagtttgggatatattattgtacactgtcttccaaaaatatttattaacataaaaaaaaaagtatacaaaagttactaatatattattccataaatgaattttttttcaattctagttgaaattctattataaattattttcctaaaaatgtgcgaaaacaaatcaaccataggtaatattagtgtgtaaattatttaatattttgactttatttatgttgaaatatgattagagttatgattgataatctaaattcatcgtactaagtgattaaaagttatgaaaatttatattaaagaagatttgaagataaaatgagtatactatataatatcgtattacctatatagaaagaaaaagaccaagcaatacaataacaatttataataccactaatttcctactataaataacaataaaacttataataccaccaatatcctattgtaagttacattatcttattatattaatttaaaatgaactctactagaatttttggttccgaagccttgagtcaacaaatattaataaatttcatttctatttgaaaaattttttatatatattgtgtttttgtttattttctatgttgaccttgcaacatctagacagttttccgtcaaaaggttttttttataaagactaaaattttggaaagtataccttttgtacgaaatcttaaaatattaaatataaacaaacaaacgagcaaataagctgaaaaaccaaaaccttgattaattaaatccactcttaaattataaaaaaatatgtatcaataagttacatatcttaaaagtttatatataccttagtttttgtaagttataataatacttaagagccacaaaagcagaataactttccgtcaatggagattccatactacaataattttacacaataatcaacaatattgaaaattgattctattctatgagctaattttctaaatttacgcaactttttattgccttgccagttatatttttctgtgtttctagaaaactcttcctaatagaatttagcatcaaaaagaaaatgtacaaacgaaaagttatatattaaacatttttagaataataagatactagaaatatagaattaacaaatacgacaacttcaaacaattattgaaaatatactaacaggtaatatcatagacaaatttgttaactttaatataaagcgtactaattaaaaaataaataggtggaaattttttattttaaagttaagaatataccttaaaattgggaaaagaagttaaaaatatttcttgtacagctcctttttttaatattctaaatacctatattttatatttagaagaatctcttttttatatattatatagaataattgaagcattttacatgtaatatatatacaaagaactacatttattaaatatgtctactagcttcagtaatatactaggcacaccttcttgtaagaaatattaatattgttatttaaaatcaaatggttcaaaagaaaaataccaacctaaattagttcgatattgactggtatgtatatagtgaccataaacatattcaatttaagattaccaatatttttttaattttatttgggtcataaaaaacttgaatttataatacgtgctgtgctcatgtgtataaattaatttactaatgttttattgttattttgtataactaactaattttattatttaatactaaagtgtattacatattaattaaaaataataaaataaattaattacatgatcatttagtactttctctaaaaaagccaagcaagaggggccaagcaagaaaagccttgttggcgcaatcggtagcgcgtatgactcttaatcataaggttaggggttcgagccccctacagggctttccttttttaattttttagttatgtaatatatggaaatcctattaacaagaaatatactcttctagacgctaaaatagatagatatagcttgatttgttgtctatatatgacatataaactatactctacataaataataaactaatatatacagatatacagataaacatagttatataaacaagatgaacataaaaaacaagaaaaacaagaacgtcgtcgtcgactaaaaagttcacaagatcgtttatagtgatatcaggatctcatatatcacagataacagttgaataagaggtaacacgctatggattggaatgtagtactgcaaatacattcttgtagaataataaaaaatgtttactaattcttggttgttgtgttctacatatgatttataaaatttacaaatataagaaaacaagaatgttatcatctattagaaagtttacaaaattgtttatcgtgtcgttcaagatagtaaatatcacataatattattaataatcacctaaagagttataaatatagcctctctttataactttagacatattattaaagaataactaaactaatataattaaaatcaaccaaataacatatattttatatctaactattttgatacttcttgtcagttactcttcttgctcttttttgttggttacttctgctctaagtatccatatctatcctttataacttctccatatttcaaagattaaattttgattatagaattttttaaaaaaaggtgtttaaaagagtatatatagtcctatttcgcctaaactagcagtcagctccttaacgcagtgacatttgggatattactatatttattgcggaataaaaaatataatatatactgctttttttaaacagagataacaaattatggtaaagatgtcaattcttttttagtttatttttattgtgaattattctcactcaagataggaacgatatataaaaatattacttataaggtagtagcaaatgtgaaaaataagattgataaacttataataatagttgaatgaatggcaagtgctgaaaatttaatcaagaacaactaaatctttttaggaatataaataatgagatattcatgatggtacctttgttttcagagattttcaaagtttcaatgcctatgattcagaatattcttaaatcgactttcatatacatatatatatatgcatttaatttgagtcaatcgtaacacaatagtatatagtagggattaattcagaaaatagttgtttaaatacatataagtacttaacatagtcccttaattacaatctagtatttttatagaagaaatagttcatattatatgctctatgaccagatgtacttattttttatcaaaaactatgagcaagatagaaaatttcctttagttgaggtatataaatatacaagcatatcttgtgacagtttatatcttaattattagatgtataaatatttaaatatacagtatgacatgagatattgtcttttttctgtaaaagtttttctcttcttccaatctcttctcccctctacttccttatatcattgttgttgagctgttataactgacatacatttgaattcatttgaatatgttgccttccatagacgtactttaccatcatcacctgcacttgataatatagtaccagtcaaattccatgacacagaccatacctcaccattatgatcatcgtgttcacttaataattctacatttaaagatgatggtggtttctttgagcctaacctcagtgaatcgttattaaatgtggaaaattttttctcgactgatttgttattgttgtaattaacagttgaattattttgattataataatcagtgtcattagataaattctccgttaatttaaagatacgaacattaccatctttggaaccagttgcaattaattgataccatcttccaatagatggcgcccaactaatacttctaattagtcctctatgaccatccaattttgctataacttgatatttatttatattattattattattgttgttgctgttgttattgttattgttgctattgctattggctcctgtattttcgatattagatttattactgaactctatattatcattactattatccatatcaacatcactattaataatactttcttgatcattcatgctttgagatctaaattcgtttttattattagaaggtacagaaccagtaatgttatcagttgaatttagagtattactcttacttgattgcaggttaccaagtttaccaaataaatcctgtttataacttaaattgttattatagtttttaaatggaagctcactaacgtcttcattattcttagataccttttcgtatatcatagcctgatccagaacacgtacagctaacctttctggagaaaacctggaaggacaccaagataatccaaaatcagattgtaaatgattagcaggaggtattttcaaaatattaatctctgaagtcaaagtccatgaccttaaatccgatggctctaaagcttcgtaaatccgcaaagttccatcattaccaatggtagccaattttaaacctagatgtggtggagcgaatttaacgtcatacaaagcgccttgtgagtcgtttaaaacacagagtagattccaacgtttaccggagcattcttcttgatctggattttcttcccacagttttaaagttttatcatatgagacagatgcaataattctaccgaactcaggcaatgcccaatcgatggctacaattgatgaatcatgtgccttccaagaatcacttaactcccatttatttgtttgtttatcagctttaaaaactttaatgtgttgatctgaagaacatgtggctacatatctaccataaaagtcatatacaacatcgtgtacgagatcttcatgcccactatcaaaaggtttcattatttgttaaacaggaaaatatagatatagataaggatgtatttatctatttgttttattttatttatttgtaatcttgtatttagaagaatacaatgattgtgaaacgtttttcttcctgatgtaataatatttagtgtcagctacttaaattacatatataaacatatacatacatatatatatataatatatatatttcttatattcaacctcacttttttttttttttttatctttatttttcattttttttttgttttttaaatatactcataaataactttaaaaaacaaaaaaataagaaagaaaaaccatattgaagtaaatcaaagacaatattacaacatatcaatcgataagtttacgtgtagaatatatatatatgtatatgtgtgtataggtaagcatgtgtatttacttatttattctgatgatttcaactgaataaaaaaatcctctctttcttttaatagcgccttcaaccaacctttaacttcttcagtagtaatttggtcaatacaatcatagaattgttccaatcgactcaattgatctgttttatcattcttacttgtgcaatctgacacaaccgacttttcgtattcaaaacattgtaccaacatctcgaatttatccagatcctttgcatagactgcttcaatgcatctttgttcctcataatccagccaacgttcttttatttcctcacctgcctgtttgttgtatttagcaactatctgatcacacaaatactgaatagccttagattctcgtagatgtttttcgtttttatctacttttgtatcgaatggagttatatcgcctaccagggattctgcgatatcgtgaacaaaagagataagcatgcatttatgcctatctatggttttgtctcttaagagaaatgccatcattgccattctatacatgtggtcagagatggactcggccaaggttggcgaaattccattatttagccatcccgttcttttttgtaatttcaaattttgtacgatatgaaagaacgctaatggatagttgtaattattataaccactactactaccactaccaccaatactactaatactactaatactactactgttgtgattattgctgcgggtatcaatatcgacacttgatgagtttttagttgtggtaactatattagatagaagtgctattatattctttgagacatgctcttttggatcccaatttgtagtggacatcttaatattaattttgtaagaaagaaatgaatttttttctatattttttcttttctttgattttttggtctctgttacaccctcctccgcctcttagatacgaagaaatatatagttatgaacatagagaaagaagataacatgcccatacatatagccatattcttatttgtattcataatcatattcatatataaaaaggaatagaatacaaattttgaatagagagaaaaaaataaaaaaaaaaaaaaaaacaaagaaaagaaaaaagacaaaaaagaaaaaaaatagaattatttcgataacgtaatcatgaattgaaaaacccaaataattattagtaagcaatattacaaatataaagatactatatgtttttatttatttatttattgtcttaatatatcttcaataaactttctataatcaattccaccatcagaatccacatcaataccttttaataattcctccacttcatcatcgcttagtttttcaccaagaccagtcaacatatatttcaagtcaccgacagtaacttttccggtgttatctttatcgaagacctggaacgcctttatgaagtcctcgactttgctttgtgtggtagaatccaatagttgttgattgtcagagatcaactgttccaattgatccaatgtgaaagtgccgttactggcgctgttatcttgtgagtctatcaaatcctggacctgtttattagttggattgtaacctatggctctaagatagtcacctaccatagaactgtcaatggacccctgtgctttcttatcaaatagagtgaagatatctttattgttagtggacatgatatatgcaggaaaaaacaaacaatggtaattgtggttgtggttataatgataataagaacggtgatataataccgagatgtgtatacctatagaaggattgttcatgctctctatatctctttctatatatctatctatctatcaatcaaatctctctctgtatgcattttccattttccattttctgtttcacctgtctcgtttttttttctttctgtggttagtgatgaaaaaaaaaacccagtgtggcgtcgttgcaagtgacatagtggggagaaaaaagggaaaaggacaagggaaaaaggaaaaaaaagaaaaaaagaagaaaggcggcaaaacccaataaaaaagatctttgctttaaacaaacacatgaacaaacatatatatacatgtgtgtgtgtgacaagacgccctacaacataccataactccctacatctctcctgcccttacatacaaatccattctcttgcttttttttggtgttttttttttttttagttctacacttacctatgctatttagaagactaccaaaggattcaacgactagttggaaattggcactatctgctaaccgtcctaaacatttaaatcttaatattagaaatactcatacttatggattctacagtactcttaatatattgaatttaaatgatactattattaaaactggtataagatttaacaacaacaacaacaacaacaacaacaataataataataataacagcactaacatttcatggaacaaaaattattctacaaatgcatctaaaaaattaactgggttatcttatcttcatactgattccaattcttcttcttcttcttcttcttctgctgctgctgctactgctgaaacaaacccttattacaatcagctatgtgcttttgatgataatgtcaatcagatccttatggataaaaattttagaagacccggatttaacactaaagactcctccaataattatagttctatttctaattctcaaaatgtagctctattctgggactccataactagagctatccatatctatcaggatttggcaggtgtctgtccagacatgaatcaatatagagtctccgctctagtcaacctgattcacaacggtttaagaataaacaggttccaactcatcaaactgaacaagaaacctgattacgactctaaatcctttcatcatgaaatgatcagacatttgaccatcactctacattccattatggaggatatccttaaccataaagtctcaatcaacgaatacggactaatgcatcttctaagctccatgaaagaactaaatctacatttggagattattcaattatgggagctcgcttcaagggatcctgtcttaaaagatctgtttttacaacctaaatgtcttggtgttcttttgccaatattttatcaatatggtaacataaataaaaatgaaaatgaaaataacacaataggttattccttctcagatttaaaatctttatacgaacaaagtctaacaaaattgccatatacacatcccaatctaatatgtggtatgatccaaacctctcttatggccaatgaatcgcaatacgcattggaattattcgatcaattgtctcagttggctgacaacacaaatgtgcccaacaagaaaactttactaaactatctaaccgatgctcatctctcctttatcggtaactgttctgatatcaacgttgcagagaccttttggatcaaagcacgcaacaacgaaatgccatacaagatcaatctacaagtctcctacattaattcttttttaaacaacatttggcaacaaacccaggacttcgataaagtcgttgatgtatggctgactatggtagaccactacaaccaacttaacctaaacttgggcatattttcgtcattaaataatactttcatgaacattttcttcaattataaatttgttgacgataaaatagccggattcaaaaaattgaatcatatcctcaatctctaccaatcaagaagaccaatcgatgaaccactgctgaatatcattttgactaaaggcaccttatcctggaatgataaaaacatatacgaccatattagacacctttatcaattgtacaatatccctgagaccatcatcactaaaagaatccttttaaagaccttgggttccttgaataacgatgcggtgagtattaacgatatttggaaccaatggattgaactaattttgaaattggattctatgggacaaaaatatatcgcaaatgcagattgggcagctatcagagatgcaacgttgacaaaggtcaaaaaaaatgattctacagcaactcaaagagaagaagacaaaaagagagctgaactgtatgtcaaaattgttaacttatttgccccatattgtagagatccacaacaaagagaccaaatctcaagaaacacagtctctaattaccatatcctgaaaccatactgggaacaaggtcagttccagaatattgatcatactggactagaaataccccaattaaatagtttacaaccacaaccataacaacaaaaacaatatcattagattttactggtgatcttcaatttatgtatctatattacatcatagaatgttcactaaccccgtctcaacgcatatatagacgcacaaacacatacacccacctatatatatatatatgtctatatatgaatataatattacctgtgaatatgattttgtaacgattttgattcaaaacattattatccctcttcatatattacaagaattgtcattacatctgaagtgatacccacttgcatctatatatttaaataaatataaacaataagaggaaagaacaaaattttgttttatttaataatctctccacaccaaacaaaaccaaaggattcaactagatacatactcaagcaaaaaaagtaatgggcatctgtggtagcaaacagaaaactgttgatcacaacagcaataacaacctcaataataaagagataacaatgtcaagagctcaaactgtgagaaaccaaaaacaattaactcaagctgtgtctacaaaaccaaagcaaaaaccagacaagaaaacacaacaacctagaaacaccataagttccaagggaaacatcgttggtacgaataatactctcaatcagagtacttctaacataaatagtacaggagtggtagataccaagaaattgtcaccaagggaagctgctagattggcagctgagaaaagacttgaagagtctaccaaagaattgacaaagggtaagttgggtaagaaactggcggagcaacgtggtttgagggctcaataacaggtgtaaccatatatatttatataagttgtgtagtatagttttatatatacagctaggtatatgtaatttatataatgacttgaaatgaaaaatagaaaaaaaaaaaaaagataatcaagtattattaaggaaatataggaactctttaaaactttatagttatgtcgaatttcattaccaagtggtatagaaatatactcatatcataagttagcatttttgtaactcaaaacttgttatctaacattgaattaaattagataagagtcaacaacttattataacttaaataagaatgatggctgaacaaccaaaaagaatactcgaaatcaacaacaacaatgagcctcttaatcttcccattgtgaaatttccaccatacacattaagagctcaattaatcgaaaaagatcctgttgtttggttgcatatattagaaacatacgtacactattgccaatggttgatggcaggtgacaacaatttaggtcacggatctaacatttctatgattgatcaactagatgagaccactttagatcatcttagaatctttttaagaagttatcttcatgaaatgtcgttagaagctgggaaattagtcagtttaggatataatcaagacgttaaagagcaattacaattgttgagaagttggatattctatatcattaaatcatgtggtttaatatatttacaaatctttggtgaaactctatgggatctagttaaattatatgtgattaataatcccaaaaccgttcaagatttgatacttggtgaattagttccaacagttaatgttcaaagagcacaaatcaatagaattccacaattacaacaatctttgaaactactcattgaatcaaataaatttgacagaacagatttaaaggcgttacaggcattattatcgtatcatgaaaacactactaccacaacttttaataataacaatagcaatggcagtaataataaaactaaaactacaaatacaaaggaagaatggttttccgaaaaatatttaactcctaattggatagaaaatctggaattatggtggtcgaagggaaaaggtcgtttcaacgaattatcaagacaattatgtgtaacacttctattatcagtaagagttcctcaactggttaaatttttaacggaagacttagaaataaccaattctgatacactattatattatccattgttaggatcaatcctaacgaatgataattttttgaataaaagaaaagatataatcaattacttaccatttttgacattgtcttctattgaagttgatttcaatgattcacaaaatacgttatctgatcaaactaatttagcatctataaatgagcccaataatgaagatatatcatatttacaagaattgtttcctgatttgaccagaaaacaagccatacttttactaacaaattatgataataaccttaaattaataacaaatgagttatttgagaatcctactttgataaaaacattggaagcacaagaaacgagaactagcaaattcctatctaagattgataacattgatgatgacaaacagattgaaaaaccattagttctcatgaaaagaaaagatgaaagtaaaaatataattaaacatgtaccagatgaaattaataacaagatattaactagaacattgaagctattgtatcaagatgatgaagatgaaagagatgacacctacgacgaagtagaagtagagactaatagaataaatggatctactcaacgaataggtattggaaaagatgatagtacttttatatttgaagatgagaacaatccagataacactagcaatgataatagcacattagaagacagttttgataaaaacgaagcatacttatgggacctattaaaacaagataaaaccttatttgaaaggagtaaaagaggttctaacattagaaaaaaaataaagaatcaaactaattggtctgatgaacaaatcgaaggttgggcaagaatgctagaaaggtctccacagagagccagaatacttgaagagagatatatgttccatgggaatatcaggactgggaaaacatcttatgtcaagaatagagatgaaaataaagatactaataagaattcatcaatatctaataaatataatgaatcatatggatcaaaacccagcaataatccaaaattaaacaaaaaaaaatatcaaagaggaccaaaaaagacagacacatctaaagttacaaataagaatagagacatcgtcaaaggaaattctaacaaaaatgatgaagatgataaaaagcacaaaaataaatctactaagaacaaatctactaacaataaaaaagcatgagatgattccgtatatatagcacaaattaaatgagatgttagggaataataaatagacttcattacaacagtttaaatgtcacatcaacatatacatacacacacaagtgtatatatatatataatatagatttcttgtgaacatcacacaacctgttttggaaggtatcattgtaggaataatcatccttttaccttccttatatttatcatccagttttcactgctcatattatttctcttgttctatacaaaatttttgaaaatcacacaagagaaaaattcaaaaccaaaaaaaagaaaaacagagagaaagagaggttgaagcatagagaaaggaatagaagacatagaaggaaaattaaggagctataaggtcagtgtagtgttatgcttgaatttggtcgcttgattatctaaaacgacttgagttatttaatcttgtatcgttatttagaattatctaataacaatcaacactgttaaagtgaagtcattttatcactcaatattgttgcctagttgagagtctcctggtaataatacatatacacattgatacatatcttcaaacacccataaaagcttcttttccactgatatacttattaatttccttattattgggataaaattacaaaataagaaaaaaaaatggataaggctgtcgtttctatctttaaattgatcaaggctccaatctattcacattgtttatcccaagataagtcattattggctatcacttgtgaaaataaatgtcttatctataaaattaatccagcttcaaaaaccccacaattagtagcaactctggataaccacgataagactgttacagcagttgatatctctattcatggtagaattgtgacctgttctcaagatagaaatgcctatgtttgggaaccattaagtgatggtacttatagaccaactttagtgttattacgtattaatagagctgctacatgtgtctcatgggcaccaaacggttataagtttgctgttggttccagtgctcgtatcattgcagtctgttattatgaacaagaaaataattggtgggtctctaaacacatcaaaaaacctatcaaatccactatcaacagcttatcatggcactataatggtgttttattagcatccggtggtacagatggttttatgagaatcttttcaggtttcattaagggactagattcaaaggaaatcatggctaattctccatggggttctaaatttccatttggtacattggttcgagaacaatattgtggtggtgcttatattcacgatgtgcaatggcgtagcaatgttgaaaaagtagcatttgttacacatgatggtactttaaacattttggattaccaaggtaccttacaatctgttaattctccagatggtttaccatacaaatctttactatgggttaatgaccatgaaatcttatgtgctggttataattgccatcctaccatgttctcagaatcgtcacaaggctggaagttttctagagattatgacaaagttgctgtgtctaatatactcaaggattcttccaacaatttgaatactaatccatctaatcagcaatttaataactctctaaataatgacaatgccaatgatgatgagaatcctacttttggtatctcagctttaaagaaatttaaagaattagatttaaagggtaaagtttctttggaacaaaaagaaggtgctcatgaaaatactattgtgggattaattccatttgttgaatctaatggtcaaatcacacaagtctcttcatgtggtttagatgggaaagttgtgatctacaatatttgaattggcaggacgttttaatctttggtattctatatatcctttctttctttctttctttttctttttactttaaatatataaatcatatctaatatttatatatatgtacacgaggtccattagtatttataattagataaacacataatattatatatacttcatggagcactaataatatttactaccacgtttcatgaaactatttaccgcaataattataatattattgtcatttttaaaagttcaacttggatgatttgtaggagatctaatcattttcctaattacctgtcaccattatcacctttattaataatattattttgattattattattattgcttgtatgtattgaagaactattattcattagattgaattcattctttctttgtaagataaaagaatatacactacccttaaataatgttccaataagtccgatcttagtctcgatctgtctcatctcctccaatatctcttctgcagacacattattagaattttcttttgtttccctcgctgattgatttaactgtttcactgttacatctaatctatgaagagattctgctaattgcgaatacttggacaatacttcctgttgtaacttagacatattttgtgaattttctgacatttttatcttcactgttcttactccttttatctttcctattcgactatattcagactaacagtgtgacaattactaactgtatataatagctgtttgcttgcccatttccacagaacttttctgtttaaacagttaactggcattaataactttatctttagacgaactagctattaaaagttggttctaattaaattacattaaattttgtaaaagagaaaaaaaaaataataaatactctaacttttttggtgtaagtataaacaaacatacataattctcaataaaaaagtgcagagaaatataataattgacatatttatataggtatactctcatttaagaaggccccaaaactatctagatactatttgtggagcaatataccatacgttgtttcatttatcttttttcctggatctttttttcttattctgcttagatttgaagatgtccaacccacaatcctatacaatttggtctcctcaagataccgttaaagatgtggcagaatctttaggacttgaaaatgtcagtgaagatgtattaaaagcactggctatggatgtggaatatcgtattttagaaattattgaacaagctatcaagtttaaaagacactcgaaatctaacatcttaacaacagatgatattgctaaagctttaaaagtattgaatgtggaaccactatatggatatcatgatacagtatttgcttcacgttccaacaatatgtcgaatatctcttctaacagcaacattaacaataataaccaaaccaccacatctacaactgtcaccaccactgtgacttccagtaccactacgaccgttgctaataaaggagttaatagtaatatttctgctgatgataatgcattaaatggtaactcaattgtagaagataagagacatgtggagttcacaagagttaatgtttcaggaggtcaacaaatttattacttaaacgaagaagagattgattttgataaattgataaatgaaccattacctgcagttccaagattacctacttttactacacattggttagcaattgagggtgtccaaccaaatatcattcaaaatccaaatctaaatgaaattagaactactataccgccaactactagaggtgccattgtgactgccctaaatgacaacagtatacagacagtatctaataacactacttctaatgctaagaatgccacccacaatgctaataatcaatctttaacctacgtgaaaccaggtcaaaatattgaagtcaaaccactagttaaacatgttctttcaaaagaacttcaaatttattttgataaaattatcaatgttttaacgactaaagagcaaccagaaaattcagaagctaatgataaattacaacacatgaaggctgcagctcttacttcattaaaaacagatagtggtttacatcaattggtcccttattttattcagtttattgcagagcaaattactcacaatttatctgatttaaatttattgactacaattttggaaatgatttattcgttattgagtaatcagtctatttttctagaaccatatatccattcgttaatgccatctatattaacgttactattagcaaaaaaattaggtggatctccggacatatcaaagaataggaataatactagtaattttaaatcacaatccaacaaagataccaaaactaatacaacaacacaaataaatatgaatgttccatctactgaagagtctaatgagcaaattaagactgaggatttctcaagccaagtagaaaataaaaatgaagataattctaacaaaactatcaacgattcacaagaatcatcttcagtacctgaagtcaaggatactcctgcaactaatactgaagaaatcaaagaggatactagaccagaagcagaacacattcaaaagactgaagttgattttatttccgatgaatataaacaacatttagaaagtactaatgcactacgtgattttgcggcatctttattggattatgttttgaaaaaatttccgcaaatttacaagattttaaaaccaagagttacaagaactttattaaagacatttcttgatacaaatcgtgtatttggtacttattatggttgtttaaagggtgtttctgtcttagaatcggagggtgttagattcttcttaggtaatctttatagctggtccagattagtttttaatgaacaaaatttaacattagaagaccttgaaaaacattctggtaatccaaatattgttaaatttaacaaattagaagcagaaatattgattaatgcaataataaatgctttgagtatattaaaggatgatttgccagaaatctatgaaggaaaaaccggtatcgtaaccaatgaagagaaagaaaaattagtcaaacgttgtggtgttactacttcttattatctattgaaaagagatgatgctaaagaacttatcactgctatcttttttggagaatgatatgaagtgcttactgttgtttctatgttagattacctctattatctactctgttttaattaccataaaatatatacatactcgtttatattattaatcaaatattgatgaattaaatagaattacattgttaaccacagctaggaagaattatcatttaattattctataaatttaagttttggtaaattattatataatgatattttaatttgctatataggtatattattttgtgttatcaacgtaattataagtgcaagctgtagctgacgattatgagctttcaaattagaatttttgatgaaggacatattgacaaatagattttcagcaataaatcaaggggcaaatagtcttcttctaacattcctactgctgttctttttactatcactctcttttgtttgaactggtgtttcaaacacgctaggggactcaataacaagggataatggactttttttgtaactgctattaaattgataatgtggagttgcaccaaactcggcagtattatctttctttatagaattattattatctttaaccctagatgcggtatgtgtcatatctggtttgtgttcggcaagttcattcattgctggtgattcaattatccctaacatagtggtatgggactttctataagataatgaagtctttaatggcgttgccataacttctacagtgttctttttatttttttcttttgaattatcttcaataacattacataaagagctttcatagaatgatacttgacgttcaaaattattaaatgcttgtggtttacgttttcctactctctggaaagacgtttgaatattctgtgagtcttgttttaatgttgacaataatgtagaactgctatcaatctcctgttttatattgatcgtaggtttttgccttttagtagtagattcaaagtttgacattggaagttgcctcttttgtaagttattcattactaaatcagattgggtccttattaagaatgatgtttgtttagagatattagattcagcctccaagaagtcgcttaaattagaatttgtttttgacatttgtagcaaactacttgaaactagtgaagaatgacgagatagtctgggtttagatgcacttttattattcatgttatttttatgcaccaaggaagttgctgagaaaaccctttcagatggtgatgattgagatcccatttctctaaagataggttcattaatcatatctaattctgattgtgtatttctttttcctgatggttttttagctcttaaacttggacctttcaacttttttataataaatttggtggtataaggaatgactttattgaaatatggaattacgacataaataacaaatcctagagaagaactttcttgtcctttatttaacatatttttttgatattgatagagtttgtttcctatactttcttcttcatctgtctttatagttgtttctaaatgtgtttctagcaaaatctccaatattgccaatttatctaaataaacgtcgatttgttcacaaaaatcaattgatattgtaagttgttcagttttttgtgattcattaatatttgaatctttgtcttttaatgtatatctattttttcttatatatgatttttttgtcaaattgagtgaacgtttcattaacttgggtttataattcttctcaaattctttaaaattcccatccaaactattttgatggatcatttctagtaataaaattatctgtagtttgatctctcttgcttttaaaattgtggctacctcatttattctttttttcatagagtgagttggtaaaagtgaatattcttcaagtaatttatctctagcaaatttttcatacctgctatttaagttagaatcctcgagtaaagtagaattattgttataccttttatcaaaaatatcaatgcggagtattagattgagtattattgtttggaaatttaaaatgaaattatctccatatttttctttgcatatatttctaaatcgtactagattagatttaacaaaatatgccaatggattctttaaagaataaagggattcataatattttctttctaaataatcctttggattagtgtctatcgtctcagagagatcatctaacttattctttaccacttttgaatcattagtacgtttatcaggaggcaccatatttaaagtatcatcatcactatgaagtgaagaagaataatcgggttcttgtttccaatatttaaataattctttaacatcaatgttgtagtaatttgcataactatttttattgtcacttggtacattctcctctagcttagaatatgttaatgatgatatatatgattttggaaaataataagtaaggtagttatccttgccgtagttttctaaaataaaataagtaccaatactatcatctttaattacgtatttattagcaaaatctagacgacttatattatcaatgatatacttgggtattttattcctatgtgttactttgggcatttctaaatctgacaatagtgattgtggcaatacatttaaaacacctaaaaggttccatttttccataattctctataataattattaatatcaaaataacaacaaaaaaaatatggatatatgaatatatgaatgtgaaaacgaatagtaatgttaaagggttctaaaatgctttaatttattttggtgaagtatgatatatcttatttaaagattggattcatattttttatgtcaggcctgtctaattattgtttattgtagatctcatctcatataatctataatgttgatcatatatttaagcattgggcaacagaagagagaaagaaaaagagaaaagccctacttttagcagttattttttaggtgaatccttatgtatatatatattttttactaaaatagttttagggtttgtaaagaaaatttgtaaaagtttattctttttttttttttttggagaaagaagaattctttgtgaaatttcaataacttacgattacattttattatgacaatttattgaaactgtcaaggtaataatataaaaaagaaaatatgcatataatagatttacttattttatggtttgttgctcaattaatattgatctcatgtttcagtgaaatgttgaaataaaaatattaagccagaatagtttttattttgctttttttttctattcacatatataatattagtataatacataaagtacgtaatttctatgtcatttatatatttcatatgttatgtttattttaattttttacattcaaatatttattcaatacaatgtagctaatataagataatatatacttagccatggtgcatcttcttggtttcataatttatttttggaatatgtcaatacaaaaggttaactggatagttctttatattttatttaagtttattaacaagtaaatattttataaaaatattttttttttctttaaaaaaaaatttctttattattgtttattgttattttcggatattttagatctttatttgagctttatgtttcattttgttttattttggttaaatttatccatttcaatcttgttactaattaacatgatagctgcttgcacacccatatatgtaccttcaatagttaatttacgttcctcagaattttccacaggatcagcaattatcaccgaacaaccagtagtatctttgatagaattaatatgcttaccttctttaccgataacattaccaacaaaattttcatcaatatatagactttgttttgtgatagccattggttgtgttggaatagttttatctacaagtctaacattgggtaaagtcatgtttggaacaaaagtggttgcattagcagcggcctcaactgtatatacaatattggactccattgtagttggtaagttcatatacccttgaggtggtatcatggtagcagctgcgccttgtgggtctattgacggtatcagcattaccattggtatatttgggacacctttactgttgtggtgttcataatttgattccatgctattactattatgatatctgacaggacccataataggttggggcatttgatacggcaaagaggaagatgaggaagctgtcattagtacagtgttattattgttattgttgttgctattgttgtttgaatttgtcatgttgctcattcttggatgaaatatgaatgggaatttccctagtacacagtgcatcagaccaggttgataggggatggtctttttattttttaatttatctttatgtgcattaattatacgtgctacagtaagtgttgcaatactgatggaggttggtgagcctgttacacgtaatattctgtctgtagatggtaacaaacgatgtggagatgcttgtagttttactgaactttctccttcgatctctttcaatacagaaccgttctttccgatgacataacccattaaataatgtggaatcaataaatttacagtaatagtagagttttggttatcacttccttccacagtggtggacaaattttcttgagaggattgttttgaagcagcaggactgggtaattgatcatgatcaaaactttcaatattttgttgtttttgattatccttattttctggagcactaccagtatgaccttcttgctcattcactggagtagactcaggagaataatttttttttgttttatgatcaattaaatatttacagataagataataagcctttgaaacgttctcacaagaacctcttacgaataagactctctctggaacatctctaagattagtagagacattaatctttgtaagagtgtctcttttaatgttgttaatagtttcacctttaggaccaacaattacggaggcgtccttcactagacataacattcttaaatagacataatcattattataggtaacattagtattattagtggtagtattgttatcctctttattatcaattggaacatttaaattgttcttaccatttaagttagttgtatcagtttcttgagattcggtatcaaattgttgcctagatattgatgtagtagacactggggaagaattgtcatcatttaaagcgactcttttaataccagcctcgatcttctgttcctcagccccattctcattctttcttttcagcccaccatttaaagattgttgtgtttggccattttgaggttgactgtcaatgttgttttcttctgtcattgtcacgatccaaactaattattaaaggaagcaaatataagaaggcacagttttactttagcttctaataagtatgtacggtaatgtataaccctgttaagttataacaaaaagaagtgttcgagaaggaaggtttctctttttaacttaagaaagaaagaaagttttgaagtcaaaggaacctcataatattaacaacatggcaaataatatttactctaagccgttttggcaaattgcaaacaattttttttttcttctctctggtttccctggctatttttcccctttgaggacaggactcgcagacttttcctttttgttatttttttttttcttttaatcttggcaattctgtgtttcccttctctatttcctcctcaaacagaaacgaagacaacaaccaaaacttgcaaccgcaactacaaccacaaccacaactgcaactgcaattgcaactctggcttgggagggggacatgcttggagcaaactctaaatgtctttacactttgaagctcttggaagatgatagggtggtaacaattccatttaagatatctacccagagatagaaaacgtatataaatacacacacataggggaaggaaaaaggggaaggaggagaatctacatagaatacgttcgtgtgtgtgtgtatgtgtgtgataaaaacgtatcagttaatgataaagaaaggattcttttcaaattttatagttttttttctttcaaaataaaacttataataatattatcgaaatcttatataaatagactatacattccgtctatccatctatatatgtagagatatatgcaagtattctctttctttccattaactacttttatgtcttttttttctctttttcacatccaacgagggacgtctaaactagtaaaaatcattgtaacaatactcattataccttcacctaatactaaccctgaactgaacactatcaatctagtctttgcatctaaatcacctttgtatcttgttaaccagaaatgtgaaattaatccacctacaaatcttgctatggtgaagcttggtgcattatatatcccaacgcccactgcaacaccagagggtatatacattagccatggtgctagtttatcattatctttgtaacaattcttaattaatgataaaaatgcaaatattgttccaaacacaattgaacattctagtgctttatcaggtaaggaattcccagtcacaagtcttgcacaatctacccatactgcagcagttgggatacgaatgacctcgtttggtaaattataaactttattatagatgatgtatactatgcttgaaagaaatattgaccataccccaccaatcagttgtgcaatgaactgtgctctaggtgacgcatttaataaatggccagtcttcaaatcttgcattaaatcacctgcttgttgtgcacctgcttctgctatcccaccagctacaatgtttaatagaactgaaccgggatggttcttgggcacaataaatgcaaatattaattgggataacttacctattccactgacaggatttaaatcagtctcaccaagtgcacgaatacctaaaatcgataagaataaagctaagatcgatgctgtaaccattgtgtatacagggattatatctattccaaatagatatatgacaaatacaatacatgaactggcagatattattaacccacttattacagtagtacaatgaactagatatttagaatctacctcgtgttctaattctgcattagccaacctgatggtctctagacgtcttgaactagttcttcttctcttaatatttattgctctttcctcctctaaaagcatagattccattgaatcatccaataaattactgaataattcagatttattgtttataaaccaaaactttatcacagatttcactgtaattacaataaatcctacaacactgtcaactaccataatggataaagaacaccacagtatccatccttgaacacctttatcccaatcatgtacatcagcgtctgctgggatccatcccataaaacgcgctaatggtgctagtattccccaaccaagtattgcaccaaatagcatgtatgaaactgtagggagacccataattataccttgtccaatatatgctggagatggttggaaattccaaaggtacgttttagacaaataattgccaaagattggtaatgagcttattaagggaataaaatatgatactattgtataaaaagatgcaattaaaaaagtcttcgtcaaaattgtgatgttttctgtgtatgtcaaatcctcctcttcttccaaattgttaacaattgttgaatcttccggttctcttaacaatattgttggaggcgttatagaaggtgaagaggatttgttattttgactaagtaattcgttgcagatagatctcatcttgaacaaatctgtcgttccataatctttacatcgacatctttttttcaattcttcattatttatcctaagtacttcagcacattcggcttgtagacgtctatttctcatttcaattaattcgttcttagacacttcttgaacaatttcagatcctgtaagaacagatattaagacagctgtagctgaaccacttgggaatggtaatttttctctaacaatcatttgtttccttaatggtacagcaaaaaatataccaaaaaatgctaatgaagtacaccatataattaattgtgtgaatgaaaatgattcatttgtgtctcttgtatatccactttcttgaggagtaatgaatttctctattgcagggatcacaccaacaaatccaaaagttaaagggcctgtgccaatggctacagccatactttgtacatatacagtttcgacatcagtaaatatttgatcatttgatcttattaatggccatacttgtttaaaaaaggctacagctagtaaagcagatggtaacgacatcatggatacccagcccgtttgtagtccaaattggaaattagacactaggacggcagaaccaattaagattcctataatagtggctctaaaagtgacttgattaatgcttggtttatcattccaattaactggatatgaatatgtgtcatcatctgtcgtgcttggccttatataatgagacatcaatgttttgttcacttctgatttgtccataagaacagaatataatagaccaatagtaaacgaggaaacaacactaatgcttttctattaaaataacacctatttgaatattagctattaatattaatttgaatatgtggacaatacttgtgtactttgcaaatgtttgggaatgctcaattacttctgaaacatagatatatacgttagtatatatgtattcattagtaaaatgtttggttaattgttctcttatttatgattactaatattttaaatatgaaatatttctgactcatctccttattaaacctttttttttaattgccgtacaattttgacatagcttcaatttagaattaagcttgatccaatacaaacaaagttggaagaatgaatctttcaaagaagaaggaaaggaggtttaaagttcggaaaacgtgtttgctaggttaaatttgtgaattcttgggaaataagagattaacatttgcctttgtattgaacattaaaacataaaatttttgttaatattcttgatctggggggaataaagataagtcatatataaaatcaataaatacacttttattttacataatatgtatatatatgcatatatatgtacatgtatatatacaaaatcatgtcattaaacgtcattatgcaagggcggaagaaggaaaatggacatggtacaaacattaaatataacaaatgataaggaacagttttagaataatagttaacaaattatgttgtatattaaatgttctagtttttatctctttttttatttatttttcacctaataggatgtatctaagaatatcatctaacgataagacaccaactagcctgccgtcgttgtctacaacaaagaatctatgtactcttgcctttctgatagtatccataatagtggataatttatcgtgtttagtacatgtataaacaccctcaaaatcgtcacttcttctcattaatgcttcaccaacacttaatgataagtcgttgtaaattccacctttaatcaatccaagaacatccactgcttcataaacattgattaaaacaccattttcatctacaataggaatagatgctatgccattttgtgataacagttgaattgcatcaatgacaggagtggtcataaagcaactcttgacattttcctcagttataatattcaattcaccaatgctttttttcaaaaaattagtctctctacaattcaaagcaacaaattttaatattctgtattgtgttaaaacactcaccacaatctctctatgtgtttcttcatcctgatcaatcaatggaattcttcttgttcttgaacccatcatctttagacatgcttcaaaaagtggtctagaaggatgtattgaggctgtatctaatggctcgacaccaatagctctttcaatatcctttaatccattcagttgtaatttatctaccaattcatatttatctggattagagaaataatactgaataacgttaatgaaatcactagatgttagcagccctgcaaattttgaagtttcagaatcccataggggtgcggatacaatgttgttttgtagtaaaacattcaaggatttcttaaccaataatgcagtatctaaaacaatcagacgaaatgacacaggaaggacatcataagaagtcttcgaacttaaaaacgatcggatggattcaacagccaatttttgttcgatttgtatcttctcaacagaatcctggtttgaattcattgtaataaagtaatccctctatagatttatcaatggtgtacaaattttttctctaagtttcttagtaaacaacacagaaataggagtaaggaaaatgaggtacaacaaaataaacctactgctttgtagcaaagacagtcgctaattgaacgcaatgaccaagatgttaacattttaaagtcaccactcaataagaatgtatactagagaaatgcctttgtatattctttcttttccgaaaagaactggctgtttttttttttcatattggaagtttttccatttttgaccaatatgagggtaattataaatcttgaaattactgataatttcgagagtagaaatttgatatttggagatgcattaacattgaatggatgattatgccatgttaaatcgataataaaagaaatatatacagtactgccagtatatataaatgctattatttgttgtttattttttttttaatttttttctgttgatatatgaattgatgcgtttacctaatcaaataagaatgggcattagatctaccagaagagtcactgtttctatctaatccaccgtctgctcctgaatcaggtacccttgttgcatttgtacctgtaacagatggtctgagtaaattaatatcatcaacagccaaactacccttattatttctgccaactctttttcttggctcaaagattttaaaaaatttcaaattctcatcaccaccaatagttgctaatgtagttccatccggagacaattgtgcacatgatattcttgtatcatgtgctttcacaatctcaccaattttaaacttagtatcataattatatactataattgcgttatccggggatcctccggtggccacaatttcacgattcattgttccatgattactgtgataactttgcccccagtgcaacgaacttacttgtgagcctgtattaattgatcctagtttggaacctaccatagtattccaaaagtgtatatgttgatcattttgaccaccaccagtagctaatacattaggcatatatggacaccagcttatagcttttactgctgccatatgggatctttttacccataactcttgagatgtcctggtatcccaaattcttactgtgttgtcattgccaccagatgctaattgtagtccatcactcttatacgacaaaccacagacctctccctcatggtcatcccatgtggcaacaatatgatttttaattctaacatcatttatttgaatttcaccagtacgagatccagtagcaattagtgcgtctaaccatgattgtgaaccgattcgaacacctaaattagatctcattgtcctaattagtttcatgctatcagtatcccaaatctctgtattaccatcatccttcccaaccgatatatgaatagcatcatctgaccatataacacttgctactttgattgtcttataatctactagtaaatcgactttacttgtatttgcatcccatatataaacagctgtatctagcgctaatgccagtacattgctgcttgaccatgacattaggtttaaataaaaatcgtcacgaaacccaggagcatctaaaattctctctggactcgtatcaatctttctcagtttgattaattcacaaggtgcattttctggttgggaaaaattatatgctgttctttttttcattaaataactctgtctatcaaatgatgcaacaggtggtgggggtaaatattctaaaattctttgttttacctttaatccacaagcttgggcaacattttccttgaagactactttagtttgtgccctaagatgttcagtcggggatgcagttggcgggggtaattcttcatgtaatgattgaggatctattttgatttgagaattggtttgataaagtggaataaatctgtctgttctaataggagaaatatcttcaatgtcgtgattatgatttgttgtgctagctgtgcaactattagtattgttagaataagaaaaacttgaagttctatttaaggttaatgatggtatggatacttttgaatcatctttaaaaaaagaagaatttcttttcaataattgcggaacactacctccatttaagttcaatttaggtctttcaaatatggatttctttggggaggaactattcgaatttgaaggtgaaatacttgagttatataactttccaagtaaattcttttgtgtcaaatttaaagactttgaccttggtagtgatatggactgtttactaactctagatttgtttgtctttttccaatcaatattatgatttttattcatatcatgatttaagctagctaatatatttagttttgtaggggatgttatagagagaactgatctttgtgcattattgtcgttactactgctactactatttaagtttttggactcgatctttttgagattaattttacttaacgttgtcctctcattaagctcgaacatcatcaatatagatctctactgtaattattagcaattggttgagttgatggaggaaatctttagctgttggacagtggtttacttgctaatcgttcttgtaccacttttttgtaatattatcctttgtaatattgtagttattacattgattttttcaagaaatttttttttgatctgtgccatatttgcctgtattgacatattactgttttaggaaaagcataaaaaactaaaataaaagagggtgtagaagagagtttaatgtgtacgtattgtaaatagtgcatatgtgtatatacatatatatatttatgtatgtatgtgtgtgtgtatatgtgtatatgcatgtatctagaacacagatatacttgaaagtttacaattgcatgataatgaaatatccataatatattatataccattaaagagtaagggtcctaaaatattcttctattatttaagtttaacaatgtctttctatgatgtacaaacgttgaaaattcagtattgtcatccaaatttttcttgttgtcgattttacaggataagtcttgcctccacactagaaaatcttttagtgtagacgattctttgataatattaatatataagtctttactaatagatactattttatccatgtttacgaagatctcagagctggcttcctctaatttagattttttttgtgtatcaataagtgatttaaaaacaggatatattagttcgaacaatttgctcaactcagtcatatatggtgtgaatctatctaaaatttgggtgtctattacttctctagaaggaacaatcttatctcttgctaatagttgaaaaatttgttttaggatttccttagatctaataaatagatgaataatcttggatttatctcctttaaaattagcatttgacactgtctttaattcattcttcagtgaaatcacctgtaaaataattggatggcctaatgaaagggtggtagtaggtgtagatatcttcatatgtttgacatctaatcttaggtgatctctaataagtttggcgggagaagtaaggaatccctcaggatacatgatactctccattaaattatcagtgaattctaaaaaagggataagtaagagatcaacataaattctaaatagttgatcaatagctatttgtcctcttccatcaatcttttgtataagttttgttttatcgtacaatattggtaattgttctaatatataatcactttctgaatgaatcattttttttctagcttcttagaatatttgttaaaaaaatatagtctactgttattgggataaagtcatgtagtaactataagggcatggtattataatgaatcatatagtcaactcgctctctgtctagtatcttgaatgattatttctttaaatataaaagaaatgacagaaaaaaaataataatacaggcaagactttgagaaatagaaaaaaaaaaaaaagaaaaaaaaagaagtttcatttcgcaatataataaactataaagatgagtcatttgaaaggtaataaatgtgtcaccttaaagagtttttaaaaggcatgtatatgatttttaatggaataagtgatctatgtagagtaagattttatatatttttatagaaaactgcttaatagtgttttgaagggtagtgatatgtcaactaatatatccggcttagtagtactagaacacaaaataagaacaaaagttacctccatataaaacatactaatagtatttcagatatcatggattgtttttttttcctttaaaagataagagtgggggagttaaagtagtatttcatggaataatgatattataaaagatttatataatgccatttactttttccttttatggaagatttgtaatttctttaatattattcaaataaactaaaaaaaattttaacgttcttttagttgttctgtatacagtcttgcatgaaggtaatttagaaaatagtaattttttgaattgttcaacctctgtatgatatgcaataaatatatattcattagattgcaattcaatgaaacattgaactaagcaactcctaaggcattcagagttttaaatcaaaatagcaattcatcaaactttttggaataggtcgaaggggtgtccagttagaaaaaaaagagtaagtatttgtcttgtttcaactcaaatcttattatatctgtatcacattgtctttacaactttactactatagagttactttaaacaaggtggcactctagaaatttagtttttcttaaaaatagttatgcttcgaagttttaagtttttattattctaatatttctgtttccaagcataattttaaataaagattaaagtgtttgttgatttttctaaaataataatttactatatgtatatattctctaaaaatgatctaatgatattttagaaattgaatttttttcttgatcagaaatatatataatgtataatccataataaagaagttttttacattaaaacatttattgagtataaaaaaatataagtaagtaaatttaattatatattttcagtatagttaaaaaagttgtaacatattacttgattttttttatatatatcttcatacttatataatctctaaaaaaagtaatagaagagtcctttattcaatacattttagaacacccattttaaaataaatataattgaaaataccccatatagctataatattatgagtcaaaaatataataaataagatataaacaaattttcttcattcatagtgaaaaaaatcatttatataataaaagaataaaatatttccatccaagataccttaataatgataacagtgctaagatattataataagtgcctaataatttaattctttattgctattgttgagatttagcgtctgtagtaattgaatacatagtaaatattcttaatattatattatatatttattgaatacagaattgtgttaaaattcttaaatctttttctgtatgtaaaatgcaaagataataatatataaaagatatacaaggaagcagaaatgatatgaaaaaatgattgactttatatattttcgtatttggtatatgtctattatagacggcatcaatttattgatatgttttgtttacatttattgataagcaagcaatatattctctacattttgatatcaattgatatttgctaaaatctaattggtttatatatttattctaaaacactagatttcagtagttataataaaataaagccttaaacaagacctaagttttttttttagtcactaaatttgtccttcactttttttactgagtgtatttgttgtgagtaaatattgttgactaattcaattttgtaaattaggttgattaaagtgggtattactgtccaatggaaaaataaaactatttcattaacattgttaaaactgttcattgacgacaaattcattttttattagtgaaaaaaaattttatttagttttcaagtaatatgtaaatcatatatagaggtgctgaaatcgaacgttctagaatgaatagatagaccaattagattttaataaatattaattgataaccaaatgtggataatgtattgtttgcttatcagtagatgtaaacaaaccttataaacaatttagtgttgtatgtagatgagatgtgccaggtatgaaaatatataaaaccaacacttttttcatatcatgtttctttccttgttcatcttttataatcatccttatatattatatataaataaaaaagccaaagaatttaatcataaatttgtatattaaatctatctaatatgatattgagaatgtttattatatatccaatgactacaggcgttaattttcaacaaaaggaattgaaaacgtttcatataaattaatatacatactaattacaattgttgagaatgagcgcctgtagtcattggataaagagtaaacattcccaatattatattaaacagattttgtatacaaaattataataaagttcttcactttctttctctatatacaacatagaaataataatatacaaagattgtaaatagaataaaaataatgtatgatgaaatccttggctttatatatgttaacattcagccattttcctctacgaacagtaagatatttattaaacaaactcaacaacctttggtgacctctcaacgattattactcaacaatttatcatttagtgtctgctaaaatcttattgttctacctatttcattatagaacattctatttcaacatcaatggagttaaactgattcctttgctattaacgtaaaatataatatattgaatagaaatttcacctcttttctcttaagtataattgagtattggtttattgtatcaaacataataactatttttgtatttggttatcccttctttttttaagttttatgattggaactgtatttttcagattttcttattctcaaaaatttttaaaggtggaaaatatctcttcattgatgaacatagttaagagaataaacaaaaaaaatatttttttatagagacaactttgcttaaaaaaaattttaacattcactattttatatgttacaatggtaaaaagtgttacacaaacaaatatgtgtatattaaaataacagacaaattattcatatacactcatctaatacttgtacatgaaccaataggcgtcattactcgcagccttattaaaaccaaaaagataaattactaagaaaaaatttaagaataaactacttgtttaaacgttgatactgatataatgacagaataatgaatacaaaaaaacaaatgtcacaatttttatctaaccatttcatataattacaccgtatagttatatatatttatttttatactttatataaaaatgctggattgatatattaccggtttgagtaacatgtaaatatatcaaagaggaaaaatgtttgttttgcacgttcaacgttatggagataagatcaaacagaatcaaaataaattaatatattatgaaaaattgccaaaaggtaaacatatataagtagacgactttacttattaatttttcaatctggatgaataagttatatacactttgtcatatgtttcttttatatttatataattattaattccgaatcaaaagatcgagggaaaattactctacatatcaatataataataatacacaataataacatattgtatgatcaccgacgctaagaacatgtatactaatattattcatccaaaggaaaaaaagaccaaaaatttctaattaaagcaaatatattaataaccttattacttaaccataaccacttttttgtagcaacatcttaggtacctcttttaacaaagctgcttcttaaataataagagcgatcgcctatagtgttgttcacaattgaggtgatcagcttaattacattgatatatgaattaattgcttatagatcatgttataaactgagtaatatgtttattaggtttctttattaaatactgttgttaacatatcgttaatattttttcaaaataattccataatataacatataaaaagaatatactgcaggtgtacatgttgtattgtgaagtggtgaaattctttgtgtatttcaggaaagcgcaaataatattaataattattcaagtaatcgagacagtaatcaactataatcgataatataattactgaaacggtcttatatattgagcggctttaacgagctaatatatttattcgaagttacttgacttgttacttacttgttgttctatttatgtttatatataatatataaattatttacaaggaaagagctatagaagataattctttatcttcagaaaacgttgtccttttatatgttttctggagctcgatcaattattcagattgatacgttaatgaatttactgatctaaaccctaagatttattacattaatctaggtgcactagtggattagaactgcaccccaattctctaatcatggtgattagtaatacacgtgggacttattgaaacaataggtaaattctagatttgttaaaatctcatgtaatctaatctttttattatacagcatctaatgttgtagcacatgtatggcttattaatacaataattagttctagattcattcagaatcttatgcaatcttgatgattataactatcctattccacaattgtatgacgtaagagatgaagcggtggctcaatggtagagctttcgactccagttaaattctgggatacctggaaaattgcaattgaagggttgcaggttcaattcctgtccgtttcattttcttttttgtcatacatcataattatatcactattgacgatttagtactatgtgtgttgatgttattattcttatttcccatattcatgaagatcaaacacaattataaaagctaatcaaacttaataaacaccattactatttattgttactccattctaatagttttaagaaaaaattactttcccaccactaatttaaaagaaaaatttttttagacatttaaaaatttttcattagacatatatactcatatttcatataatatcacaaatatatttactaacttaatggtaccaggttaactacatatatattacagtagtaacatttgtatctatttatttaatactatttctatatacatgtcaaatatattatatgtcactatataccaaagattccattgaggaaatcaacagaagaataagattagacaaataatattcaacaatatcgcttatttgtgtaattttcccaataatttccttctattttctgacaggtaatctatgcaaatattatttttttcaaaacaaaaaaaggaaaaataacaaagcatcatttatttgattacaacttgaaactataatattcagatatcgaaactttttatttattatgattgtaattattctttattctttataagcaaatatttgatcaaacaacctagcacagtgaacagaagccccaaatttagcacacagtaaaaaaatcccactgaactttctgtgtaacgaataagtttcttctggtggtggacacagcctctcgttaaccattaaccctatattttctctgattctatctgaaacagtttgattctgaaaatcaaacaatgtaccaacattgcctccagtaaagggttctcctaatgtcataacactatcaacgtgcgcttctatcatagcagaagactctaaacctgtcaggtaacccaattcctctgacattttcttcacagcatttctatcattttttgtagtataggtcaataattttctatatttaataatgaattcatcaggaaatggtctcgaagcaccaaaatctaacaattcaattttctgggtcttttcattatataagaaattagcccaatttggatctgtttgcatgtatttgaattgtgcaatctctgtcaaacacaatctcattatattctcagcaataaaatttttgattttctgcgtatttaatcttggtggtaacttcataatctcataaccctccatttttgtcattgttaaaatatttgatgtggttaaatcttcaaagacatgaggtacagaaaatacctcatcgccctttagtaattcttcgaatttttgtaaggctttagcttcacggatatagtcacactcccacttcaattcttttctagcgtttgcgacaattttatctaaaaatagccccttaggcaataaccttgatgccgtcagtaacataagtaaattacttaaatcagaatcgatagatttcttgacacctgggtattgaatctttactacaaccttttctccagatttaagtgttgctgtatgtacttgacctatacttgctgcagcaataggtattctgtcaaatgattgaaacctattttcccagtcttcacccaattctgtttttaaaacccttaataactgtctctgaggcatataatgagcactattttgaactttagataaaatactatacagttctgctggtaaaaccttttcatcttgaaatgacatcaactgaccaattttcaatgcagcacctctcatctgagaaaatttcttagttattctttcaatatttgagtctgataaaattaaagatttccatgttggtgagtttcccttagccacttcagttaaaccttgtgcggcaacattcatacttacacctgcggccaaacttccatagtgaaataatcttgaaagcctggacgatggaaccttggaactctgtagatttcgtttggagtcactttctttctcatcttctttcatgccattattattattattattattattattattattattattatttaatttcccaatttcagatattttagaaggatcatctcttcttactcttgttgtggagtaatgtcttgtagtattaattcgatttaatttcttctgtttagaatttgatagggataaactagatcttattttatcggagatacctcttgccttattccattcaggatcttcgtaccattgataatctgataataaagattttaaaattggagacgaatcaaaccatattttaaaggaatttcttgcatgtgaagaagatttgtaaaggacatttttagatgctactgatatttcccaaagataatatgcagctctatattttgtcattcttggaaaatagaaggaggaaagttttaaaaaacaaacaaaccacagataaacacgattataataaacttctataacttcctcaattccttttatccagtgatgatttgctaatcagtctagtatcccgacaattagtacaatatactgaactataatcactcatgctctgtataaaaatcactttaaactctcaatggcccaaatagcaaactctgcccccccaaaaagcttttgagctgcatttgtaaagattacgggaaaatgaaaaaaaaagaagtcaaatcaaatttttttgtacaaaaaaactcggggatgcaagaaaaagttatgagtgccataactattactaatatggattactaatatggatgattcgaaacatcttcaaattattataacaatttaaacatgtatagaattaatcagttaataaaagagaaaaatttactaaacgctgctcaaataagaccatcctatgtttaacatatattaattgtcttgtattttattttcaccactcttattgataaataaatttcgtggaatatagggaacagagtcaagaaggtttcattttaatttattcttatcaagtttatcataaacgactattaattgaaatcttggtgaagttcaaaccactttttgtagtaccctccccttggttaatagagtttactacaatatacatgaacacacacacacgctaatggattatctatattgtccatatttgtgtcaaagtataagaataccagtcaacaattcttaagtcataaatacctgaaagaaaactgagaaaatttaataatcaacagttatatctttttaataaacattatactgctgtttgaaatctaatacgcttccattatagaattggtgaaatcagataaaagtaacaatattaaaaaatagtattattatgaatattatatagtatgttcgatcaataaaaattacacaatggctattgctcaaatctatttaatcaactaagtatctataatagttctttgtaacttagtgacaaaacagtgttttttcatttttttatataatccagattaaaatatcctctaggaaaatttttttcttatgttttttttttttttaattgaaagagaaaaaaatctagaaaaatataatcaaatttcaattatcagttggattgagatgcgatgagctgagcttacttaaatatatatgtttgaaacaaccacttgctcttctcctatcttcttaatgtctcttctgtaatatactactaagcagtataaatataaacataagcactaaaccagtgtttctactcttttttctttattatctcaacaaaagagaaaacatatacacgtaatcaaatgggttctaaaagaagacattcaaacgacatgcatactcatcctgatccaatcaagacctctgtcccagaacatgctgcagaagttgctgaagaattaaccaagaaacaccctatcagtccagaggaaccaatggttcatcatgatgctggtgaattctctggtttgactcgtcatagaaccactgctgaacaggcaagaaaattagaagatggtaagattaacccatttaccggcaatgaatactcctctaaatatatagagatcttaaaggtcagacgtgatttacctgttcatgctcaaagagatgaatttttaaagatatatcaagaaaatcaaatcatggtctttgtgggtgaaactggttctggtaagaccactcaaattcctcagtttgttttatttgatgaaatgcctcatcttttaaatacacaagttgcttgtacccaacctcgtcgtgtggctgcaatgagtgtagcccaaagagttgctgaagaaatggatgtcaagctgggcgaagaagttggttactctatcagattcgaaaacaagacttctaataagacaatattaaaatatatgacagatggtatgttattaagagaggcaatggaagaccatgatttgaaacgttattcttgtattattctggatgaagcgcatgaacgtactttagctactgatatcttaatgggtcttttaaaacaagtcattcaaagaagaccagatttaaaaattatcattatgtctgccactttagatgctgaaaaatttcagcaatatttcaataatgcaccacttttagctgttccaggtagaacgtatcctgttgatatttattatacaccagaatttcaacgagattatctagattctgctatccgtaccgttttacaaattcatgctacagaagatgaaggtgatattttattgtttttaacaggtgaagatgaaattgaagataccgtgagaaaattatccttagaaggagataaattagttcgagaagaaggttgtggtccattagcggtctatccattatatggttctttaccaccacaccagcaacaaaggatctttgaacctgcacctaaatcacataataacagacctggtagaaaggttgttgtatcaacaaatatagcagaaacgtctttaactattgacgggattgtctatgtggtcgacccagggttctctaaacagaaagtttacaatccaaggattaggattgagtctcttttagtatctccaatctccaaagcatctgcacaacaaagagcaggtcgtgcaggtcgtactagaccaggtaaatgtttcagattgtataccgaagaagcgttccaaaaggaattgatcgaacaaagttacccagaaatcttacgttccaatctatcatctacagtactagaattgaaaaaactaggtattgatgatttagttcattttgattttatggatccaccagcaccggaaaccatgatgagagcattagaagaattgaattatttagcatgtttagacgacgatggtaatttaactgcactaggtaggttggcgtctatgttcccattagatccaatgcttgcagttatgttaatcggatcatctgagtttaattgttcgcaagaaatcctgactattgtggctatgttatctgtaccaaatgttttcattcgcccttcaaaggataaaaaacgtgccgatgatgccaaaaacatctttgcacacccagatggtgatcacgtcactttattgaatgtgtatcacggttttaagtcagatgaggcttatgaatatggtattcataaatggtgtcgtgaccacttcttgaactatcgatctttagcagcagcagacaacattcgtaatcaattagaaagattaatgatacgttataatttaggattaaataccactgattacgaatcgcccaaatattttgacaatattagaaaggcactagcttctgggtttttcatgcaagttgcaaagaagaggtctggtgggaaaggttacattacagttaaagataaccaagatgttttaattcatccaagcactgtgataggtcatgattcggaatgggttatctacaatgaatttgtgttgacatcaaagaactatataaggacagtcacctccgtcagaccagaatggttattagaattggcaccagcatattacgatctagataatttccaaaaaggtgatgttaaattgtctttagagagaattcaacacaagttagaaaggttaagagatttaaaaagtgaaaaaaaatctaagaaaagaaaacattgaggatttcgagggatatagatagatataatttaaataatacatatataattttgtataataactataaataaaagaacagcactaataatcagtgtactgctactagtacttctctttttggtaaaaaaatttttattgcatcagcaataaattgagggaggaggaagaaagacaagttatttgaaataaaattggaaatacagccatctcccctcctcctttgaaagaaatctagaaacaaaaatttacaaattaaaaaaaaaggacgcaatgtataacaccgacatgaaagaaaaagatcgggtgagacaaaaagattctgtatttttccaatgccgatagttgtatgatattagggcttgttgaagaaaacgtggaaactctccaatctaggtgactttaatgtatataatcaagactagataaattatattaaaataaaacattggtaaatctgctttaggtgctcaatattctgtaaatctaaaaaaaaaaacaatgtgaaattcatttagaatgtccatttataatattgtagctttatatctttttcttgaaaggtctatagttggcaattggatgtttaatgagtaagtgagaagaaaaaagttaggtgtacgtcgctttacaatagaatagggttgaaaattttttttaaaaaaaaaactatttttttttttggaatacatctttttcttgcttacaagccatcttgttcgaataacttaaaaggggacacctacccataaaatagtgtaatatccaaacactggaaggggggtggggaaaggggggaagggaaagttggagcaaaaagtaaatgtagaacacagatatttttccttcatgactatatatatatatatatatatatatatatataggaaatggagattgagaaactgaacatggaataaagagagcttcagtaatatttcgagataagttaccatagtaatatttgtgtgcattttccttttcttcccctcttgaattaaaaaataattatcatttgcaataattacaaccaattgactgttctctctcattctgtttttttttttttttttttttgatttctaatttttttatctcttcttcattaacaatcgctaatcatgtttggaaataatattacctatgtggaagtaaatacgaaagaggatgacccacaactaaacaatgcccccgacccagacgagtttatgggaaacaatttttggaaccaacttatagcatcaaaccttcccaatccaaatacattcaataataatagagcgtcactcaataataatactgatggaatatcattattattgacatacagcaggtttcaaaccaacgtaatggagactacaagggaattacatgatctgacaagtaagattgaattaatacaaaaagacccaccagttctagaagatgttaatttattattaccccctttgatggcatcccttatggagagtagagagagagccaagagactttataggtccactttaagtaactacatagaaagtagtgaatctgatatagatcgtatcatcaacgaattagagaaagaactattcagaactgatgagctgttggcgttacatcctagaagaggcacattctattaaataaagtggttcttaagattatgaaatatccttcttataatacacatttttcttttccatttatttatttttcgattttttttaaactcctttactataccttgctatgtcaatttatatgcttaactttatataatacattgcatacttaaataatcaatgtacaaatgataaactttatattctgatactaataccatcatcacatactatcactacatctaaaacacaaatctttttactgataatagtatattaatcctcctatagatttaattgtgaggttctcaatatttatctgtctagtatttagtgtctcaaatgaccaaaaagagaaatttttctgtccagattcttttcacaaagtggcgaaaaacaggaaaaaaaaaaacaaaaaagaaaagcggaagaaaaatttgtcgatcattgtataaatatgggttgaaaaaacaaataagaaaaggctctatgcgtgctaagatataggtttcctacttaacgccacccatgtatatatatatataacagcataacactgcgttgtcctcccctttctcactcaaagtaggattatttatctaatcagcacgagacaactgttcaaataatcactaactgctaaccataacgatgtcacaagaacagtatacagaaaatttgaaggttattgttgctgagcaactaaaaggtgtaaacaattttacagaagatgttaattatgttgcagaatatattgtactattgattgtcaatggtggtgatgtcgaatcgatagtgaaagaattatctacgctgttcgatgctatcccagtcgaggtgttaactgatattgttcaaacagacttttttgcacttgaagctctacaacaaggtgaaacagtagaaagcattgtttccaagattagagagttaaatgccattcaacaacaacaagtgcaacaacaacaagaaccagcacaacagcctatgtcacacattcaatcagatcaaccaaaacctgttcaacaagaaatcaaccaacctgaaacaacgactgaacaacaaccacaagttgtttcagctttctcaaatgttatctctacagaaaaggccaacgactctaatgatgtagctatgggtaatgatgaaataactccaacaaactatcaaccccgtttttcctcacgtggccgtggtagtggtagcgtaggtaaatctcgtagaggtggccgaggtagtgcacctcgtggaaaccgttcttacggtcataataacaatactggcagatttaatccattagctaaagccttaggtatgacattagggaatggtcctgacaaaaataataaacataacttgaatttcgttgctactaaaaaggagggccgttgtaaattgtttcctcactgtccgttaggtaaatcctgcccacatgcacatcctacaaaagtttgtaatgagtatccaaattgtccaaaaccacctggaacatgtgaattcctacatccaaatgaagatgaagaattaatgaaagatatagaaagaactcgtgaagaattccaaaaaaggaaggctgctttattagctgctagacaaaagcccgttcaaacaggattagtcatttgcaaatttggtatcttgtgttccaatccattgtgtccgtttggtcatccaactccagccaatgaagatgcgaaagttattgacttggcttggtgtccaaacaatttaaaatgtgaagataaagaatgtagaaaggcacactcatctctttccaagattagacaagtggcgccaatgggccgtcctgttggagttaatggggtcggctccaccactactcctaaaccacctattgaaaagtctttagaacagtgcaaatatggtcctcgttgcaccaacaaacgttgtaagtatagacacgcccgtacaccaattatgtgtcgtgatggtgccaactgtactagaattgattgtatttttggtcatccaattaatgaagattgtagatttggtgtctcatgcaaaaacccaacatgtttatttagacatccagagggaagaacacaaccaatgcaaaatccaactactgatccagctgctacttcatttattccacaacaacaagttccaacaaatgaaagattatttgcacttccagaaggtgcacatatcgaacaagcacctccacagcaaccagaagtacagcaaatacagcaacaagcataccagccaccatttctttctcaaggccaaggcgatactgaaatgagttgatttgatttaagctgcttttacccaatttaatataccattattcaatgtatcaattttaaatcaagattaatctatcattcatttagaagagtcacttaaatttactattctatactaaattttaataatatattatatgtgtttattttatctacaaaataaaaataaaaataaaaacaaaacaaaataaaaaaaaatctataagaaaaagaataaaaacaaaaaaaataggacagataattgattaaatgtaatttgaatgtaaacatggcaaactcctattcttatgctatagcctcttgtattcaatttctatcttgattttgtctctgttttcctgttttgcacctttttatacgatcaactctttttttaaacatttcttatatttaatctcttctcgaagttgttcttattttattgaacaatgaatattatcttagaaagtgcttctataaatcaatttccttaaagacaacacgtgttcaattattcctaaaacatacacaagggttcttttcaatcttgaaatgagaatatatcctttattcctatgttataaataatgctcttccatagtaacagtatagcctcctacatacaaaatctgattgacagagacacaaaagtagaaatgagtaaaaattattctttttttttaagatatacaaattaataaatagttaaatgtctatttatttatttatttatttatttatacacttagtatctcttcttttgaacaacagtgtcatcagcgtagatgtctaatggagataatggtaaagcttgttcggcccataagtctggggttaagaaaccgtaagtattaccaatagcagcaaaagcagcctttaaggtgttttctaatgttctggtcttaccagtagattgagtgtagacatcttcaacaccagctaattgtaataacttcttaacagctggagaagcaacgataccagaacctcttggagctggaatcaatctcatggtgacagaaccacacttaccagaagtcttagtaactaaagaatgtggttgacctaagttagaaccccagtaacctcttctgattgggataacagataacttggcaataataataccggctctaatagcaccagcgacttccttggcagtcttaatacctaaaccaacgtgaccattagaatcaccaataacaacaacagccttaaatctggttctttgaccagctctggtttgcttttgaactggcttaatgttcataacttcatcagataagtttggtaataaagtgtcaatgatttggaattccttaactggtaaagagtgtaagaagatttcttcaatagtggtgatcttaccagccttgactaatctacctaacttggtaactgggacccaacccttttcttcggatctaccacctcttctgttaccacctcttctgtttctaccaccgaaaccacctcttctttgttgaccttctggagcagacatttttctggcttattagtgtgtatggactatttgtcttattaaatcggaatggaacacggaaagtcgatgttggtaactttcaatcgattttaataatcacagctttctgtatgttgacagcaaataccttaaaacgataaatgtagcgcaagaccctctactactatatggaatttaacaatagttttctaaatctagctttgctcatcgcaactaatctgtcaaccactatttacggttatctgtaaaggtatgataagttttgtttgaagagaatttaatgacttattgatttttgcgacattacattaaaagtgaaaaaaaaacaaaaataaaaatcagttcttttatacaaaagtttatatgtcccaaaaaagtaaaaataaagtgaaacgtgcaaatgtatgggtgttctaataacattaaaaatgagaaagaaacagtcctttgaattaagaaaattttctgtcaagaaaataaacaagatactttaaaactaagaaaaaaaaaataataataaagatatggaaagacgtcgaacaggattttaaacaagagtggtttaaagaataaaaatacgatgtagtatattatgaatacgtgcaagtcggactggcataacctgatgttttgtacatacttgagcaaagaaacattatattaattttacatgtagacatgcctgaaataatgccatcttctgttcaacgcatattactattacttgtgtaacctgcgactaggactttttgaaattgttttctatattaatctattatgttccactcaaaagaaatttggaaaaatgtgatctgcaatatatatttataacctgaaattattgattatgctttttgttaatctaaattatcatttcctaattatattttaataaaatattaatgcttacagaagaaggttttttcgttattactgtcttacaagatctctttgtttagtctcattttattatgcaaagagggaaatgtcttcctatccatccacaaaaaaacaaaacacatttaacacagacattaatacagtaaatatcttgcttatgcttgctatcatataaataagagaatggaatatcaaaagaaaaaaaaaaggaaaaaaacaattgaaaaatgatttatacagaattaatacatatgtctacttgtgatttaatgactttttttattgaaatgcaattcattactctttttactcttggtgtgcctttgtgttgaataatgtttcatatcttttatgttataattatttaatttataattaccaataaatgttaaatgttttattaaatgaccaatttcaattagctgatccagataaaccagttctaatctattattttttagaaaatgtaaatctctattaaagcccatgataaccttattcagctgcgtcacatactgcttagcaacaacacctctcttaagcattaatttattgatcttgctaattcgtgtttgaggatttacagtgtataactgcttattttccaaccatgtttcagaacagaccttgtcacaatttcttgtctcaataacatttgcggcttttaatagcaagtcaatctttgtatccatatcccaagtttaataaagtttagtaataaaaatatatcttagtttattcccacactatgcaaaaagaatattctacagttatttccacagttattgatatgaaatggtccagtaatattctttatttattcattcatttctctggcttttatatatttttctctctattaattgaacgtagtttattactttgcttttcttaaatattactacatcctttgataatatatattaaagactgtaatttaatataaactttgctaatataaaaaaataaaaaaaaattacacaaaacactcctaaaagatagaacgatggatattaacttgttttcgtaaatagtacattcttattaactaggaatgttattaaactttttactgtagaaattcgttacttggattcatttataaagatttattaaaacgttatattagtgatcctataaacaatcacaaactttacgttattgatttatactactaaaaatagtatagcttttgctcttattaagagtttcgctcagataaaatctaataaatatggtaagtatgaaatagataacaattatctctgatgatttctcaacaatctgagatctcttaaatgagttttgaagtaatttgtcatcaagattaacttaccaatcactagaatgcaaagatcatcagacataaaatcataacaatactaactcaataatcctgataataagaactacccaaaaataaatactttaggatcatcaattagagtttcttaggtaaaattcttttaaacttccgaaaactacggacatccctatatagtcttgatttatccttttgggccaaacttaacacattcattaatcatattctgcagaataacattgtccaagaacatgcaattgaaagtgaaaaaaaacagtaccatccttgtatcatttaaaaagaaaagttgctttaaaaaaaaatcattacaatcttttagaccatatactataatgtaagagttatctcaagtaatatactaaaatacggatattcgtcacatatacaaacaattgcagatttccaattagggctttttgcaatattattctctatatatgcgagtacctatattaatatataaaaaaatataaattctgtttaatatacactggttcctaatgtatttaatgtttgtaaaggtatatattaaatataaatatatatataatttgtattaacagtaaaacgtatttgagcaggtgttcatagaattagctaataaaacaagtagaaagacttgattaaacaaaaattgttagtattaggtatggatttatgtgatactgtagaattatcatgtttttttttaggagattattttaaaaattttaaataaaacgataattaatatttatttctttataaagatcctgaatttatttttgaaatattaaaagtatgtatttgccagttaaaattgttgaaaatgagcgcctatagtaattaaataaatagtaaatattctcaatattataattagatagatatagaatacaaaataataataaagttcttccatttccttctctatatatgatatataggcgattatatataaaggataaacaagggaagaaacataatatgaaaaaaattattgaatttatatactttcatatctggtacacttcatctacagacagcaccaaattgttgatattttttagatctactgataagcgaataaaacattctccacattctattatcaatttatatttgctaaaatctaattggtctatctatttattccaaaaaaattcaatttcagcaaaaataaaagtgttgagaattgaaatctgtatctgtttgtatgttgtatacattctcagctgtaattattacaatattaatagtgtataaaattatactaatattcttcaaccattttccgtatgtataatgtagaaataataatatacaagaagtttacaaataatcaaaacacggtatgaagaaacaagtgactttatatatattagcatttattactcctcttttacaagtgacaaatattcatcaatttattttgtttactttaattgataagtaaacgatacatactccttattttagtgtatatttatgtttactaaaatctaattgacctatttatctattctagaacatttgatttcagtatatgtgactcttaaataatatttactgaaataaggtattttaaaatatacaaatagactaatctgattttagcaaataccagatagtgaaaaactaggtatttattgtttatatactactaaacattaatctaattatttagttgatttttatcacccctagataagaagccactcgatatgtccatgtatatagacccaaagatttatttgtatcatattttctctccatatatattttctctgtatagtattattcatatactgtgtgtaaagaagaaaagaggagagcatcagttcagttgagtttattattaaatatatagaaattataatgaaagaaatactcacgctattcaatacttataagtactaattcgtaataaatatctattgattaagaagcacagtataagtatagcaaattgattatcacagattctagaaacaggtcaccacttgtatttaaaattttgaaataattactatttttatttcaaactaatagtcgtctgtgtattcctgatatagttcatttatctagatttcaatttacaaaccttaaatattttataattcataggcctttaaaattatgtctttttctttttgcatattgtaagcaaggcaagatttgcaagatttagaaaattaattgataacttttttccctcaacaaaaatactgactaacaatgggaatttacttacttggtaataataatacaagtaattatacagtcactctgatacattatttcttaatttttgcaaacacatattatcagtagataacttctaagagttataatttttcttgatcgttagatctaatagcttaattgttgggaatgagcgcctttattcattggatatatagtaaacattctcaatattatattaaacagatttagtatacaaaattataataaagttcttcactttctttctttatatacaacatagaaataataatatagaaagattgtaaataagataaaaataatgtatgaagaaatccttggctttatatatgttaatattcagccattttcctctacgaacagtaagatatttaataaataaactcaacaacttttggtgacctctcaacaattattactcaacaatttatcgtttagtgtctgctaaaatcttattgttctatctattttatcataaaacattctatttcaacataccacccatagatcaattcaattttagtagatccaattctcagttagcttggcaaaaattttaacactcaaaggttttgtaagaatatcagcaacgttttgacttgtgttaatataattcactgatatattatcattttcaatttcttcagcaatgcgtaaaaccttagtaccataaaatttattcttgatttttgatatgtctcttactttgatttgatggagactagtttgactgtcagttaatattgaacacctgacctccttgtctgatatagcctgaattagaacatttaaatttcttaatcttggaattgcttcacaaattgaataaatttcactttcggtagaagaggtgcatgtaattgttgacttagatgacctagcaccaatcaaatttccatttagataatacatatttccaaattgtgatttcatatcgtgttgatttgcaaaagcagcatcagttacagcagttaaatagttaatgttggagttggacgtcttgtgccatatgagccgtttgttccttgttgaccaaataaactgaattagttgtttggttagactcatgacttgttttgatggatatagagtatgtctagctagcgtgttgacataatataatatatcatatctgtacttgtaaccgacatatgaagctaaaccgattgctttttgtagccatttcaccttattcttgtactcctgctcagtcggataaaattccctttctcttataatttcattaggtgttcctgggacttttctacttttgttaaggtctacacgtagattcggtagtttttcttctaaagatttagccatacccattttcatggataatcctttaatatattctatttccagaccgagaacatcatattgattaatcttttgagcaccgtcattgacaactttggtttcgaactgtgattggagttgagaaataaggtcatttattagttgacgattattagttaataataccatatcatcgacaaaaagacataatatcacgattgaatcattgatttttttataaaatacacaaggccatcctggtacaaaattcatatgacaactattaataataaaattggttatcttcttataccagtttgcaccagactgtttcaaaccgtaaagtgatttctttagtctatgtactgtatttcgtaatcctaaatggggtggagaacgaatgtacagttcttcttccaatggagcatacaagtaagcagatgatatatctaattgtataatatcatagttgttttgtaaagctattgatagacaggacattagagcgtaatggtgaacagtgtttgacatcagatctggttgataagtcgaagctttttgttggtctcccctagcaactaacctgcatttgtgatgaccatctcgcttgacactaaaaataaacatagagttaataattttggatttgtctacttctgtagcttcaatagtttttaccgaccaggtacccattttcgtcagctgagatatctctttatcatatgcttcttggaatttttctttttcaattggatccctattgtgtgtgattgcttgaaaatattgtaatggaccatgctggttgttctcttcactgctgacctggtttatggtgtggcgtgtagcagcaatgtaatttactgcatatgtttttgtagttttcctacgtttaccaatacgtgccttagttctttcgtccctgtctcgcttctgccgttctttggcatcgacaggttcaggcgtttctacattggtgttcttttgacgattaccagatcttgtaccacccaaggtactattgtcaacgtagaaattatcagtaggaatgggggtgagttttgatgaacgattactagatggtggtgtagatgaagatgtagtgagatgtagtatcagtagagacagcagtgggcagtggtgatgattcatcagaagtaggatgagatgaaggttcaacaagagttaagggtagttgattaggatcattgatgtcgatgggagtgattagttcctctaaatcagaagaggtgggatgagtagtgtggttgttagatggatttgaattggaagtagtattggtggtgatattcaaatcagcatcagcatcattttgaattaaaattttatcttcaaagagtggatctttgttaacgagggaagatgatttgggtgatgaggatagagtagataaaactgtatctttatgattatcagaaggtgtggcttcaatttcgtcctttgaagatgtagtatgttcaaattttgatataaaagttgtgatgagatcgtcgaatatagaatcatcatattcttcattttcatgaatatcaacgtcatgtttaattggaacaaaattggatgaggataccaccctacgtttagttgggaggtaaaataaatagccataagattcagcatctggtattagagcaaaacctttttcacctctgacatgtaatttggaggcagttttattgaggttaataatgaccggttgaccgaatggtagcagtgacttggtatcaagtcctagtaaaccgactttagaccgaggtgaatccctcatagaattgttatatatggaattacggattatagttgcatattgcacagcgtaataccataggtggtgtgggagttttgcactattcataatagtacgacaatcatttaataatgttaaatttaatcgttccgcaacaccgtgagcttgggaatcacctgcgtcggtataaacaatttgaataccgttttcagaaagaaacgtttttactgcagagttggtgtactctgttccccggtcaaactggaattttaatatgggggttttgaattgtcgctcaatagtcgcaataaaggacttgaggacatgtaggatcgttgcatcatctttcctttttagtaaataagtccacttaaacttagatgcctcatcagtgaacgatataaaccattcaggttttgtagccacagttactggtccaaacaggtcagaatgaatatattgaaatggtttgaacacctgctggtattgcagacgtgaaccaacaatatgtggtctcttcctgctttttcctttgagacagtcctgacactgaaaattgttaaggttagaccaatcaatttcgtctatagatagattattgaaggttttatttttgatggatgtatagattgactgaacattgacgtgacctaaaatgcgatgaatcatgtctaaaggaaatttagtttttaacgcatttacagatttacgagttgcagtagatggaaatacaatatgatgattggataaccaatgtaaaccatttgaggagtcaatgtttgctgcaacatcaccattagcatcttcaatggtgttgagacgctcgtttaaaaacagatggtgagaacggagatcactagtagataaaatggtgtgatcaattgtgggtgtgtaaaaggcatgaatttttatttggctgccatttaatgtttttagaattaaatcaccctcttgatcgtatgggatatccgtgttggagcatgaggttatttgaacagattcaggatgagagtcacgaagattgtgcaacatctctttatgttttacaagggtaaccgtagcaccggaatctagcatcatataatatgcaggatttagtgaagttgaaataggcctaagtaaggttggatcgactgggttattttgttgaggaatagaggtgctatttgaatgggttttaacttggctaacctttttagaacgagctttggtagatttggcttttggcttaactgttgaaggaactgtagtatttttggtgttcaacacagtagatgtgttgtttgctcgtttattcactgatggatttgttggatactgtttttttgaagaagatggaggattaggggaaaaatgtggatcggaaatttgtgaagcttgatggtagtattgatattctctcttgatagaagagaaaatgtcgtttatagtatatggggtatcactcttaaaaaagtgtttagaaatggattcgtaagtacctgttaacgtatcaagaattgtttgttttagcaggtactcgtgggtttgaagatccgtggggttcaattgatcaattaagttatggagataacttgtaaattgaaatgctgggtagccaccattatattttaaagatctaatagtgttgataatggtattgacattactgcgttcaatgtcgtatgtcatggcctgacgaataacatcatagggatgcatttgcttgtgaaagcattcttgaacccaatcgggataactgctctgaggaacaagggtgaaaaataaattaattaaaccttgagattcttctggcgttggatctcttacagtacgatcgtgtgaatcaggaaccaaatcttttagaccagaagcaatcaaatgttttattaaggaatgaacccaggagttaaatagaccaacactagagcagtaaaataaagtagttggaatgtatgggttgttatatgtacatgaatggttaggtgaacctggaaacattggttggattggattgatgggagaataatatcccggtagttgaccataataaggaaatggcatataagcgaaaccagttggttgttggtaaccgtttattggaatatgatggtcatatgatggaccattagtaccagaatcaggataggatgactttccagcctgagaaggattgttcggcgtggaagaaccgtatggagcagattgctgatctggagaagcattgtttccagattccctagaagatgggtcaacatctgttgtagcatttaaattatgttccaactgagggttggatgggatgttggatgcagtggaagcgtcttgactggtatttatgttaaaagctttaataccagcgcccgtggagggatttacagcactaggatcactagtgtgtccagacagaaagctaccatgttgagaatgagcgcctttattcattggatatatagtaaacattctcaatattatattaaacagatttagtatacaaaattataataaagttcttcactttctttctttatatacaacatagaaataataatatagaaagattgtaaataagataaaaataatgtatgaagaaatccttggctttatatatgttaatattcagccattttcctctacgaacagtaagatatttaataaataaactcaacaacttttggtgacctctcaacaattattactcaacaatttatcgtttagtgtctgctaaaatcttattgttctatctattttatcataaaacattctatttcaacaagtatattcctcgacaaataactgcttatcttgagtttattttttgttccagaatttacaatcaatggtgttaaaaacaaagcatacgagtaataatagaaagccttttttcattattagaaaatattagtaatggaattgacaattgggataaagataaatatatttttaatcaaataaataatattttatttatttcctgttatatgacacattcttatgagatattgcataaattatttctaattttagtactccccatcagagataccgaaaacatattttgaaatatttccttttaacatcagtatcttcacagaaaatttacataacacctgacatcaactgtacttaacaagactcatttatgtatctaaaactactgtattataaataatacgtaacttggcatattaaaccctcttccatatattttattatctatgcagtatataaaaaaacaatattaaatattcattcaattgattaccaatcatagtatatagttcattaaataataaatataaattaacttagtttttttggataaactaaaccaaaaatactatattttctgatatatatatatatttatataattatgttaagttaaattagttgatgaaagatttttttacttcataaatgctacatttttaatattaattattttactccatttaatttatatttcttgaacaagaaaattaagttttaaaacttgataaaatactatgacactacaaataaaacatatcaatgctaaaatagatataaaatcgctcctctaacactgtacgtaacaaaaagattttctccctccttcgaaacttatagtgattaaaatattcttaaaataaattttttttatttgttaactgtagaaagtagaaaaattaatatgcttattactcgcaacttataaactggtatttggatgtttagtttgtaaagaatgtacacaaataatacatacatcaatttaatatgtatgtaaataaatacttttcgatctttaataaattttatttttgaatggttttcttcttgaaacatttttcaatattcttttttacaacttctagaaacaacaaataatattgtaaaaagccctaattgaaaatcctgaaataggtagtcggtgaataacatcgaatgtcgaggagaaagacttgaaacagtcaaaactctggacctaagattgtgagtgtattcgaacgaacaaacaatcgttggatgaacattggtggcaaattattgagaagcttatttaaaaaacctctgattattgagagatagtatcagaaataattatcagcataaacattcgtattctatctaataggttctgtctagaagaatagctagaatagtgataataacctaaataataagactaatttatttattagttagaatcaaccaattatataatgtgcaagtgtttgtatatatgattaatatccatattttagtatactacttaagataatcccttacataattagctttatttattataactgaaagttttcaggtaattttgagacattcattttagatatttttttgtaactcctaattacgtacattaggaagcttgtaaatttcagtacattagaaaaatctgaagaatctgcaatgaattaaaaaaatttaagtatactattataataaacaaatataatggctagattatatagttaatatataaataatatatatattctattttcggcataactatttattatattgtcttgttcttctggtaggagcttgcaacaaactgtattttttcacagatcaatacattaaaaataatcacctctcgagtagcaaccgtaatatatattgttctaataccattatggataattttatagactctttagtcgacgaggtcgttaatgcttttaatatttataaacattacatctatttctccatgcatttctctaggctgttcctggtatagagtgtagtttgtatataatatacggagaataactatcgagaattatctatcatattctatcttctaaaagaatatatctgtaatacttcagataccaatgtgtcagctagggttctgactgtcagattagaaaaataagggtcacagatattcaataaactccgctttttagaacatattacaaacaaaccttgttagtgaaaatatgagaagttataaagagaagatacaaatacatagagtaaaaataatcaacagaatgcaaaaagaagatgcacacgaataaacaaaaaataataagcaagtgtattgtttatattacttacttatattaatatagctaatatattattatatccagaaataaaatgtgaatcaatatttcatatttacttgggtgaactcttataatatattgtttacaagttggttgtaattagaggctcataaccaaatgattatcccataatgcgaatttttcttaaattgtaaaacgatacaaacaatttaacaaatcacttgatatatgcaccttttgtgacatacgaaatcctaatgtctctataaatgagcttgtcaactcttgagtcaacgtttttatttttcttgtttatatatcatatgtagagaagaaatcaagcaatattcatctattacaccttgtaccgacttcgtatcccatgatattttaaattaaatttttctaaaaatgatttcgcccaggatcgaactggggacgttctgcgtgttaagcagatgccataaccaactagaccacgaaaccatgtcttcgtcataatctgttgtagatcaaccttgatattatgattgtaaaaaacgattagggttgaaaaatattgttagggttttgtgatgattgtcaagaaaagttctagtttggaattataggacttagggtttgttgataaatcccacatgattgttgaatactatgtaacaaaatgaaacattcatgaaacattaaatagctaattaaggagaaatgtatctacggtgacagtcgttacagaacctcaaataagaaactatcaacccatagttcatatataaaggaccagtatcttggtatctaaatttatatgtttggttgatttataaaaatatgtagcacattgtataatacaaaaaagaacaagcaataatcgtttaattttcctagatatatataacgttcttatatatttgttattgcccttactattcgttcaatagtactgttaagaaaattggtcctaagtccaaactataacaactggtagcgtcgccaaaatatctgtccatcatgtccgaattcccaaccaatcctgtcctcgtccaagccataaaggtcgctcaacctttcacaggttcaactcgctcagtctttaacttacgtgaatttttgttatccttagatttaaaatttggtcttcatcatattactgatgacttccgtaaaatttgcatctttgctgacaatattggaggtaaagctacacaatggttccttaacttctctgctgatcatgatctacattccatttcctactccaccctggtctctcaattcactgcctcctttggtgcacaactagatgtgtacgacatcagtcgtaaaatttgttcattaaaacaacataataacatcgacggatacatcaaagagttttaccagtacaaaaacctgttacccgagggtgccatgagcgaacagatactcataagttattttattcaagggttaaaacccgacactagaaaggctgtcgtcttacagtctccgacaacatttcataaagccactgaacttgctcgcaaatgtgagcactgcttactagatccaattacgattaattactcaggtgacgtctcacctaattctggttcctaccaattagatagtgacggtgatactattatggctattcattctaacaaccgttaccgtagaggttattctacgcattctactaacattacatctttcaggagaggaagatcccagaactcagctgataccacttcttccaataaacgtgataaagaggaccttcgtcgtttgtgcttggaatataaactatgcttcaaatgtcgcaaaccaggacatcaatccagcacttgcccacatgcgagttctcgctaaaaataccgttacttctcattcccatttctttccttcttctttatcctctttatcaaactcccaagacacaaataaatcaagaaaaaataaattttttttcgagaaaagtgctgggtcacacacccaattaaaacacccagacgagtatacaaaaacaaaatacatcgatactactacaataccagaagtcactactattataaccaccaccaagccattagtaggtactcgacacgaacgtccatgtatcgttaacaaaataaaggtccctgtactgtttgatacaggaagtcctacttcactggttagtgaagatttagttgccaaaaacggatggaaaccgtacactgtcccaccattcatatggaaaggtgctatcgcagatcgaacctctactactaccaaggccgttcaatgtaaacttttagacaataagacatcatacgaattcaacgcttacgtcactccagaattacacaatcaagtcattgttggcaatcctatcatcgaacattatccagaactactttctacaactaataatatcactaatttcaatactacaactgacattaccataggtgctatagatcaaatttttgacacagacgtagaagaaattttttggtacaattatccaagaatgaaaatccaatcaacccccatcaccatgaacttcctatagaacttcagcaagaatttaaagacactgttaccaatgaattaccgccacagtcaggtactcatacttataaccatacgatcgaattaaagcctaatagtcgtcctcctcgattaccaccctatcgcatgaccccggtactagaaaaagaatgcaaaaaaataattcaagaattacttgataaagggttcattgtcgagagtaaaagtccagtctcatcaccagtattattagtaaagaaaaaagatggttcctatagactggttgtagattttagacaattaaatgatcttaccattaaagacccctatccattaccacgaattgatgatttaatgacaaaaataggtgactgttccatattctctacacttgatctacattcaggctatcatcagattccactagcggcagactctgaagaactaactgggtttactactcccttcggtcattatcattacaaggttatgccatttggtttatgtaacgccccagcaacatttgctagatacatgcaacgcatacttggtgatattccacatgttttcgtttacttggatgatattttaattgctagtaaagattatgaaagtcatatccacgatcttagacaagttttaacaagattacggcaagagggtttagtctgcaagaaaaacaaatgttatttttcccaatctgaggtacaatttttaggtcatacattatccactgctggttttgctgttcaacaagacaaagttaaggctatccaagaacttcctatgcctactactattaagagtgctcaatcatttatgggaatgatcaattattatcgaaaatttattccacattgcagtaagctggccaaaccccttttcgattttatttctaagaaatgtccgtggtcgaaagctcaagaagataccacgatcaaattgaaagcttgtctcacctcagctcctgttctcgttccgtttgtcccaggtgataattacaggcttaccacagacgcaagttatgctgctataggtggagttctagaacgtttatcagctaacggtaaattattaggtgtcattggttatttttcgaaaactatttccgatactcaaagtcgttatcatattggtgaacttgaattattagctatagttgagtcattaaaatacttcagatactatttacatggacatcgattcttactgcggaccgatcacagctctctactatcctaccgaagcaaaaaggaaccttctcagcgtctatctagatggctacagtacttagaagaattcgattttgatattgaacatattaaaggaaaaaacaatgctgttgccgatgctttaagtcgccctcaagacgattctgctattaatgtttatccactaaccacgttgtcctcgattaatccacaagattggtatgaatcattactcgaagatccatggtctgctgccattttagtttccctaggcgttgttgataaggtcaatatttcagcctctgatgattcactttataagaaatatattaaacgcatgaagttttcggccaaagctcaagaacgctataaatttgatagtaacattctatactatgattctcgaatttgtgttccatccaaagaacgatttacactgctacagttatatcatgatagttttttacaaggtggacatttcggtgaaaccactactattaataaacttgctccacactactactggccttccatgtcgaaagaaattaagagttttgttcaaggatgtttacaatgccaactaatgaaacggtatcgtccaaaaattaacggtaagttacgccctttagatgttccatcaggccgttggattgatatttcaattgactttgttacaggtattccaacatctaaacaaggtaatgatatgattatggttgttgtcgatagattctccaaacgtgcacattttatcgctatgcaaaaatgttatggttctaccggtgttgtccgtgctctttttcgctatgtcttctgttaccatggttttcccaaaacgattgtatctgatagagatattaggttcgcaagtggttattataaggaactcactgaccggttacacatcaagctacttaaatccaccacgaatcacccccaaacagatggtcaaacagaaagtgttaataaaacactcaatagattattacgtaccttttgtcacaatgatcacactgtatgggattttttcttaccacacctcgaattcgtctacaattcaactcctcaatctgctattggtgctgccccttttgaaattgatattggttttattccgaatgaacctcttatggatgttggtaatgactcttcagccagaaatgatagtgcagttactctaacaaaaaaacttcaagccattactttacgtacccgtgattacctacaagaacggcaagaaatgatggaaactcaggaaaatcctcatagaagctctcttacttttaaggtcggcgaatacgtcttattagatagagacatctattttaggggaggaaggtatttaaaagtccaacctattttcataggaccgtttagaattgtgaaggtttttgataataatacagtcgaagtcgatttgccttcttcatttaaaaagaatagggtgattaacgtaaaaaatatcaaaaggtttgtgaatgacaaaagacgttatcctaaggatttaccagctaccgccacagaaagaataatgagactttcagagatcatcgctgtgactggttatgacattgagtcacaaacctactactgcaagatgcaagatgttaatccagagttgatatgtgagtacaccttagatgaatttaacaaacttccgactgatcgtcgcaattcactgctatcaaacttcagaaatttatcagaacctttgggagaggaaggtgttgtagatcaaccttgatattatgattgtaaaaaacgattaggattgaaaaatattgttagggttttgtgatgattgtcaagaaaagttctagtttggaattataggacttagggtttgttgataaatcccacatgattgttgaatactatgtaacaaaatgaaacattcatgaaacattaaatagctaattaaggagaaatgtatctacggtgacagtcgttacagaacctcaaataagaaactatcaacccatagttcatatataaaggaccagtatcttggtatctaaatttatatgtttggttgatttataaatatgtagcacattgtataatacaaaaaagaacaagcaataatcgtttaattctcctagatatatataacgttcttatatatttgttattgcccttactattcgttcaatagtactgttaagaaaattggtcctaagtccaaactataacataatctgttgtggaatagaatagtgataaccatcaagattacataagatcctgaatgaatctagaaccaattagtgtattaataagccatacatgtgctacaacattagatgctgcataataaaaagattggattacataagaccttggcaaatctagaatttacctattgttttattaagtcccacgtgtattactaatcaccatgattagagaattgggatgcagttctaatccagtagtgcacctaaattaatataataaattttagggtttgaatcagtcaagtcattaatgtagtaatctgaataatcgatcgagctccagaaaacatataaaaggacaacgttttcaggagataaaagatcatcttccataatcgtttcttgtaaataatttatatattatgtataaacaaaatagaacaacaagcaagtaacaagtcaagtaacttcgaataagtacattagctcgatataagccgcttaatatataagaccgttttagtaattatactatcgactatagttgattactgtctcgattatttgaattactattaatattatttgcgcttccctggaatacacaaagaacttcaccacaccatactacaacaacaataaagatatggttccttggcccagttggttaaggcaccgtgctaataacgcggggatcagcggttcgatcccgctaggaaccattctatttttgcaatccaacacttctaatatcgtgtggtacagagcatgtagataatgtgatgaagacctattatgagagatgtactcctctagaacactaaaagagagtctttatgaaaagagacagaaaaaagcaaaggaactattgaagatgaaaaacgttcccctaaatgctattttctagaagtcgggaaaatctagctcaaagaaacaagagactagtaatccaaggcttatgctattatagtaatattatacttgttatacatatatacacatataaacaattatttatatatggtttctctcgtaaagttacatattttgataatacatatagttaacatacttttaagatataatgtgaatggaatatttttattttattttacgttattaaaagaaataccattgataaatccttttcattaatattaatatccctaatgatgtgcttctcattaatatataatacttctctaacatattgtaataggaaaaaaaaaaggtaaagattaaaaacaaattatcattagcaacaaaaaaagaaaaaaatgttttaaattatttcctgactttatatgttacacttaatcaacattttaaagaataatcaaataaatttaatttttatgtttagaatttcttttttcaacttttaatagcagagctttattgatatgtggtaagacaccaccagaggcaatagtagctctaattaaagtatctaattcatcgtcacctctaatagctagttgcaaatgtcttggtgtaattcttttaacttttaaatctttagctgcattcccagctaattccagcacttcagcagtcaaatattctaaaacggcagtcaaataaatagcagcttttgaacctacacgtgcctttccactagcacttctctttaagtaacgtttaattctaccaaccgggaattgcaaacctgccctagcagaggatgattgagcccttagagctacaccttccccactagatttacctttaccaccatgtattttaccaccggacatacttttttctttttctttttcttgtagttatagacgtatatgtatttatattggtctattgattatccaaatcttgctattgttacgtaaatagagtatcaaaacgcaaagttattcctggtgaaagaagagaccttgaagtgactcattaagtttttatgtttcttaaggtccttaactgtttatttgtttgtttacgcttttgttttccacctttctttcattcatttctttttttcttttattttttttttggtgcctcttttcttgaagatacagtttcctttttgggctgttttcgggtaaccatttttttgtgtaacgctttttctcttttaggaaattcagggccgcacacagcgttgaaaaataatttaattttgatctggtttaaaagatgaataaatacgatgagcacaatgacaaataactcaagagcgcagataagatggtgatcactaactgagaagagatttgtcaaagcagcagcatttatacaaaatattcagatactaaataaaaagggtggaataaacaaatatatatatattatatatagggcaaacaattgctccatcgttttagttttcaactaattggctttatatttttttgtgtttgtttttatactatattatttttagctcaaagaaatatgctatatgatacaattatagttcctataaataaccacacattatcatattttaagtttgaaaggttcacagtgactcatttattcttcctgatcataatttttaatctttattttgtccagggaaaacatgaaaagaatcaaaataataatgatgccactggatatgcaccacgtaaaatccactgtgactttcccgaaaatgtttctttagtaagagaagcaagttccatatcaaccaatgaatctcggtggttaaagcaaagaaaaaaaattactgtccctgcattatatgattttttagaaagatcaatgacttcttttaaaaataaagaagaagttagtttgattctagaaacattatttaatgccagaagcaaggatcatatagatacagaaacgctgtcaagtccacagattggtgttgcaatatctggtggtggttacagatccatgttgaccggtgccggggttttagctgccatggacgcaagaactaaggattctgttacccatggtcttggtggtctattgcaagcaacttcatacattgcaggtatctctggtggtaactggttagtaggatctttagcatggaataattggacctccgtacaatctattttagacaatatgcatgtagaagattccatttgggatcttgatgattcaattatatcacctggtggactcaatattattaaaacagcacagaggtgggaccatatctcaggcgcaatagatgccaagagagacgcggggtttgagacctctctgactgatgtttggggacgagccttatcttatcattttttccctaaattgaatagaggtggtattgactatacatggagctcattacgtgaatcaaatgttttcagaaatggtgaaatgccatttcccatatcggtagcagatggtagataccctggtactaaggtaattaatttaaatgctaccatctttgaattcaatccatttgaaatgggatcatgggatccttcgttaaatgcattcattgatgtcaaatatattggtaccaatgtgtctaatggtattcctgataatatcaatagttgtgtagttaattatgataatactgcatttgtcctgggcacatctgcaactctgtttaatcaattcttattgagaataaattcaacaaaaatgccaagatttatcagacgtttaggaacacatattttaaagggaatttcacaagattttaatgatgttgctgtatatcatccaaacccatttaaagatactaaatttgttgaaacaaattttactacaagtattaccgaatctgatttcttatttttagttgatggtggtgaggacgatgaaaatattccatttgttccattagtacaaagagacagaaatctagatataatatttgctgtggattcttctgctgatatggaaatacaatggccagatggttcctcattagtacatacatacgaacgtcaatttgtacatcaaggtaaacaaatggctttcccatatgttccagacacaaacacatttgttaaccttggattgaataaaagacctaccttttttggttgtgatggtcaaaacttgacttctttaaaatatatcccgcctttaatcgtttatctacctaattccgagtactcatttaatagtaatcaaagcgccttcaaactgtcttacactgaaagacaaagaagagaaatgatccaaaatgggttcgaaatcgctaccagaaataattttacagatgatcctgatttcttaggttgcataggttgtgcaattatgaggaggaaacaagagtctctaagcttgccttggccgcaagaatgtgaagcatgctttatcaactactgctgggatggtacattggatatcaaggaactgcctgattatatgaaagatgtacatggctcatttatttatgaaaataatggtgatggtaataatacaacggtagttacagaaagtgagttggtaaatggacaaacattactacttagtgacatatcatacttacgaaaatcaaattcaaagacagttaaagaaaaacaaataaaaatcaatttaaaaattattttcttattaatctgtgcattaacgttcttaataagtcttatatgaatagcattttattacaatccattttattcttttcatccattgatttctcatatatttttgagagaagtttaactgcatatacattttttgcattattggatatacactattaattaatacatccatggatatatatacatttatagatcatattttatttagacatatttttattattattccgtctatctctcatttattttatccatctaaaactataatattcatatgtttatcgtaaataatttattcctcatcgattattttttctaagaaaaatcaaaaaaaaatttttaagtcgaaagtttctcactgacaaaaaaaaaataataaaaaatattacttaaagattgttgcttaattgagcacgttacctcatcgcaacataagttcagcagcttagtgaattttacttttttcgtaagcatttttcatggaagattaataaaatattgaagactatcacattactagtaaaaaatctaagagttatgtcatcaaaaaaatctccatttaaagtattccaaggttctcaaaattttagactacgagttatattatcaatcttatctggtaaacctattaaaattgaaaaaattcgttccgatgacttgaatccaggtttaaaagattttgaagtatcatttttaagattaattgaagctgttactaatggttcctcaatcgaaatttcatacacaggtactaccattattttcaaacctgggatcattgttggtggttcatacacacataattgtcctacttctaaaccagtgggttactttgtagaacctatgttatatttagctccattttctaaaaaaaaattctctttgctatttagaggcgtaactgcatcacataacgatgctgggatcgaggccattaaatggggactattgccaatattagaaaaatttggtgttagagaatgtgcattgcatacattaaaacgtggttcaccaccattaggaggtggtgaagttcacttagtggtcgattctctaattgctcaaccaataacgatgcatgagttagacaggcctgtcataactgcaattaaaggtgttgcatattcaactagagtaagtccgtctttagtaaacagaatgattgatggtgctaagaaagttttaaaggacattggatgtgaagtaaatattactgcagatgtttggagaggtgaaaattccggtaagagtccgggatggggtataactcttgttagtgagacaaaaaaaaattggtatatttttgcagagtgtataggtgatgctggtgatgtcccagaagatatcggtagtaaagctgcatatcatctactagaggaaatttctaatagtgcagttattggaagaaatcaattaccgttggccatagtttatatggttattgggaaagaagatattggaagattgagaattgcaaagggccaaatagatgaaaaattcattatattattaagagatattaaacatatttttggaacagaagtgtttttaaaagaatgcccggatccagacagtgacgattatatcatcacaattaaaggtataggttttaccaatgcaaataaaaaaattgcataaatattggaaataaattataaatataaataattatatacacttttaactaaaggatatagatcataattatttatacaaaatggcactttctaagaagtcatgcaatctgatacaaagggaattcattctaaattggtaattcgtcaaaggtattttatattcgataatatatataaacatttattggaaagtattattaagatagcccataacaatgtattcatcgaatatcatcctttatacatttatatacatttacatactgctttcaagaataccgttacagctactctcttccgattggtatatcatctatttgactactcagtttttcccattgattcatacttaactctgaataacttgaattcaatttaacccaacttttaaacagatcacttatcataaattgagactcttgaaatatagtaaactcatgcaatatacattccctaattaaccaagctctatttatttgtttagaaatagatcttctatccctattaatagatgcttttattttatcatattcagcaccactaacatcaggtttacccttcatagattccaatttttccaaatttaattgcacatgtctttgcaattgaggtatattattagttgccataatcttatatctgtcaaatagattttttaatgatattaagagatcaataaatttcttcaattttggaacaatatctgtagaataatcattaattgcccttgtatttaatgtattaatttcatcgatatgatgattaatgatggataaatcattatttatttcaggtaaagtatcacagttggcaatattttcaattggatataagacggatgtcatatgtgcaaggtctgttataaaacttttcaacaatacattttcgtgatttatttgattcaatcgtgtttcatgcctttgtataactattgtaattttattccatatatcaataatctttgttatattactagctacatcattccattgttccgatatattactcgaccataatttcataaaacttattgatatttttttgtccataaattcatcactggtgtcataattttctttggtttgccgtctccaagtagatatatcagttggtactgttaagaaggttagtaacagatcatctttgctcaaaattggatgatttacaataaaattaataaatcgggtcaatccaacccgtcttttattaaggcatattggatctaaattttgtgaaccaatctttttaggtggcaattcgggaattaatctaaatggatatcttttcaataaaacctcctgtagccaaacaaagtcagaatatctcctaactacactcatagaagattcggaggaggcaccaaccacactgccctcatttggtaatcgctttaacctaataatattataattagtatgtttaaataacaaaccttctctttctggaatctcctcaatatttattatgttaggagaaagtggagtaaatgtatctctaattgatttcatccagtcttgtaaatcattatcagaaatttgttgttcttggggatttatctttggctgcaatttgttatccactatattttgtctacctaagataacagaattactccatatatttacttgaggatcatcagcaatcccattgtttgtgttattagccattatagaagaggagccttgttgttgaatccaagcagtttcttcattattattagctatatccttttttaaattattttcaaatattggatcttcttgattacttactattaaaggggagggtgatattgaagtctcagatcttgtatttgaatttgaagtaccaaagattctttgtgtcaaattctcaatgcgatcttgctcttccacatacaaatttgtaaaggatcggtttattggttcaggattatctatcctccatggatcaatctcggcaatagcattattatttgaaagaaaactcataatttatcttaactatttaatttgatctgttaactacataaatgaataaaaacaattaataaaataatgacaaagtcatctaattgtctataacttctacttagcaaggaagaataaccagcaaataaaatttaaaatacaactgatagttgttaaatataagtaatatctgtcaccttcatggtaggaaaaaaaataggtttatcgtggctgtacttatgcttgtattctctctaaggatctttttctttattagaataaaatttctatattcacaagtcctagatgctctgaaataaataaaaggaaaaaatgtcaatattcctccaaaattcaaaaaaccctaaagaaaaactaacaaaagaaaaaaatcagttttataaaaccccatttacgcaaaaatttctttctaagaaaagattttgaaaagaagaaaaaaaacaaaaaaatcaaccctaactcatttcttcttcacattccacagtgtctatttcttcttctgcttcttcactttccttctcctcatcatcattatagtcgaatgtaattgtatttggccaaccaatttcatttctaataaaatctttgaatttagcaagaagaaattgttctagtttatcaacattttttagagtggatgatctttcgggcccatttgaaacattatcaccaatttctgtttctatatttaatgattgtacaattgccattctttgtaatggtgcagatgaaccccaagtctggtatgtagaagacaaagtaggtttattgtttatattattactcattatatgttcaaatttactgtttgcattattcctttcatgaccattaatattattatcactatcaacatcacataaaatactaaagactgtttgtgatcttgaagttaaatgtgtcaataaacacaaacagtgcatctgtaactggcttattgtcactttgacaggtaatatcataaatctttcaccaggataattcaacactaaagatacttgcaaagatatcatcatatcacctctatattccaattctaaaagagcttgtatatcatttttatgcggattttcttcaacctgaggatgcggatcatctaatgatttcaaaatgaaatttggtggggttgaaccaattttgaactctacaatttgcaaatcttgtaaataacttggtaatgttaatgattcaacaaaatcatttaatttgttggttattgtattattcaatgttttatcttctaaaagttgctcccaattgatctcaaacgacatgttaatttatgatattagtactttacttgcatcttagtttcctgagaaaacaaagttttctgtaatatatacagtcaaaataaaatctacaataatagtgtaagatctatagaagacaagacttaatgcatttaaattaatgaaaatagctaagtaaaatgatgaaaggtttaaatgtattcgcaatttttatgtaacacaccattttatacaaatagtacctaggaatggaaacttgaagatctacgtgaagggctcttaagaatttctacattttagatctctgtaccttttttagatttaaatagacaattcacaaacaagctaacaaataaaaaaagaaaaaaagaaaaaaaaaaggaaagtaatacaatattttctgtaaagaatactaaaggtatagaggttatgggacatagaactatttttgtccaaatacatagatattttggttgagtcgaattaaagattaaatcattcatgcatttgtcaatgactatacctgtctttttgattcttaattgaatctatttttttatagatacgtatatataccacaacatataatagacgcataaatatacatctattctgattaatgtttccaattactggttgttatagtaacaatatccgtattttagtcaatagtagtaaacgtagactattgtggtccagtaaacttttcaaaattaataaagatgagacaactagcaattcagccattaaaggtgtcagatcctcaaccaaagatatgacatatactttgtgtaagactataaatgatgtttctccacagcgtactttcagtattgtatcacaaatacaacaatatcaagattatataccctattgtaaagaatctgtagtacatgaaagagaccaatccactaattggccaattttggcaagtttaagggtggggtttaaacaatatgacgagaaatttgtatgtaatgttaaatgtaataaagaatctgataatcattatatgattgttgcagattcaatctccgatcatttatttaatggatttgtttgccaatgggagattgtctcgcatccaggccgtcccaactcgtctcaaattaaattatctttaaaatttcaattcaaatcctctttatataataatgttgcatctctctttgcaaggagtttgacatctttagcattgaactcgttccataaaagaattatacaatatgaaagaaatgaaatgaagagaccataatacatgtttgtagatatacaactttagctctttaaacagtaaccgctatataaatattcaaaaaataaaaataatgaataaaaaaaaaatatttccagtagcaaacatttcatcagtctgtgtaattaaatatacacaggcatatgcgtacattcatacatatacatataaatatatatatatatatatctgtaaataacgaatatattagtaaataattatttaaaacttcctttattactgttgatccaacaattggtccaaatgaacacttggtggtctaaatttcttcgacttaacattagtatttgtgttattatttattttagagttacccatcggagttgaagtacctatatgtatcggagtgccactatttaaagttatagatggaatacttatgttctctctattactattattattattattatttaggaaaggaccaaatgtacgcatcggagatgatgatatagatgaagcagataatgttattgaactataactgttattgcgagtatgtgcgaatttattcccattgaataatacttctgttggagaaacaaacaattcctgatactcttcattagtattggtattattagtactgcaattattagtgagattagacaaactgctattatggctattaacgaataccttggattttcttgttattgaactagctactccctgctgtgcttgtttctgttttaataatttttctgatatatcagagacatggcttgaagattgtatagaagaacgagaattatatgaatgagatggagaagtacttgtagaattggcggcaccagacgaaggatcctttgattcatccttgaataagtcatctgtgaaatagtcgtcacttccattggtatgagtgtacattaaattattgtaattttgttttaaagtgtctctatagtgcttttgtgttcttgcttcataccatgatttaaaagataaaatagaccatattaaaatgatcaagaataaaaggaaacccaaaacaccaccgaatgcaatgtacactgtgccatttatatcaccaggataataataactgtaaggagcatttttttggttcggtataacaactgtagcatgtatggtacttgtagacaaatgactagaagaagaagaagaaaaagaaaaagaatatgacgttgttgaaccagatgcgtcgtggctctgacttcctgatgtagttgtcgaagtcgttatactagaaccactggtagtggtagaagtactcgttgtagttatcaatgatggtaaacctcttactactttcaaatacattatctatttcacctttatatttgtgtatgaacgtacagatatgtgtgtgcctctctagagttccgatttcctttaataaaacacgttgttttttttcacaaccaacgttaaaaaaagatcggtgtacactaaggtaagagctggctaagcaagaattgcatctaggattcatagacgtcgatagtaggacaaaagttcgcagggctggaaaggaaacacttaatcgagtgtcctgcaaactactacttcaaaaatatgtatatatattcataactacaaccaatctacaaacatctaataattgcattagatatgattaaaaatggtctcatcatttcgttgccagcaaagaaaaacaaaacaaaaaacgacaaaaaacgacaaaaaaactgtaccgtttcatcgtagttctactatcgaatgttgtaacaacaaggtacattaacctccaatgaatgaagaggtgaaaaaaagaatggtaatattcttcctttttaaaattatctacgtccatatctttttcttttacacttctataaataataacaataatgaaatagtgaagaaggttatctaaaaatagaaaaaacggctagttatctcctttatagtaacttcgaaacatagagaaacagtattgtgatatttccctattaggtaacgaatgcttagcaccacgggtcctttttgcttttttcgtttctcctccttattttcttttttctcatttttttgattttgataccaagcattgttactcacgaaaaaaaaaaattctttttgataaaacatttcgtgtcagccgtgtatcattcgcgaaaagaagaggggaaaaaaaaaaagaaagatttgctattttttggtttcttgcttttcttcttgttttttttttttgataacctgtcgatgtatggatgttttggaattagaaaagatgttactttttttttgatttcttttcctcatttttatcctcaatagtccgttcccctttttattttttcacctcctctgttaccatggttacaattagagtaaacagtataaaaaatgtccataaaaaaacggaatataatcaaataaattttatatttttaccccaaccctaatatctattatctgtacgctacagtcttcttcagtcttcagtctacagtctactcgccatttcttattaaaagttatctttgctgcgtttttctttttcttttttttttttattacaaaccctacttttttgactataaagaaaactcatactttcattgtcttcgtctttatagaactctaaccatttttacaactccagtagctgctgttctaaaaataatcacaattcttaaaaatttaatacacaacgttcccgtgaatcatacaatctccaatacgaagagataaacaagttattattcttattcttattcttattatttcattatgtatagtaagagttataaactttaatacttttaacataggatgtcatattaaaattgtaatgtatatactttttcttgctttccacttatatatatatgtatatatatttgcatagtaaaatatgttaagcgccgaatataatctttacaagctttaaaggcttatcatatacgttttaacaatccgaaaaaaatggttgattcttgacatgttttcaaacagttttattgctttttaattgtttgttcatgaagtgatacaaagaagtactttttcttaaaataaaattttatttattacattttattgattttattatagtctatatgttccattttatctgcaaaacatatatcctcttttttacgttatctttaacactccactatttttgatatttttaaaccctaaagaagaacattaagtagacaaaaaaaactatgtatcaaacctaatatttctagttttaaaaaattaacctgactgggtaatactttattttactctaaccttaaaataatttattgagtcactgtttttatttaatcttctaaaacgtttaattaaatagaaaagaaaaaaaaaaacaaaaaaacaagaatcaaacaagagagatatgtcaatttggtatttacgcaaaagatagaaataagaataaacaaaaaaagatgagataatactttacaactgcatatggaacgctattatggaaacaaatgtcttaattccgcataattttgctccaagtcctgattttaaatggttatgccaggaattgtttctaaagattgatcaaattaaattatcaaaggataaatctcatattagacagagatatagggatgtaataactagatttgtcaaactttggagaactactgtcggctcagatttttatcctgtgttaattttggccttgccacaacgtgatagaagggtatttcaaattaaagacgtcactttgattaaagctgtgtgtactactttacacctagatttaaaatcttctacagcacagaaattattagattggaaatctcatattgatccaaataataaggatcaaaatagattagcttcaatgtgtgttgcagaaattgcaaagagaagaaaagaacctgaaattaacagacgcaacagagtaacattggatttagctaaccagtggttggatcagttagctcaacaacgtgcggaaagaaaaaatggtggtagtgtggagtccttggtgcactccccactctggaaagatataatgaataaattatcatatttggaattaaaatatttttttgagattatactgaaaactaaaatattgagatcacaagaaaatacattattatatatatggcatcctgatgcaagagattacctaagtgtgacatcagatttatattctgttactcaaaaattatttgatcctaccaaaagattgccaaatgaagaaatctctctgcaactaaattcaccattctatccccaactagctaaaagaataatatcgaaatcttataacaaaattttaaataaaattaccaccaaaaataattgtgcaacattttatatagaagaaaaaatggatggtgaaagaatacaaattcattattccaattggggtcattcaatcaaatatttttctcgtagaggtgcagactatacttatttatatggttcagattttaataacggatcaatatcaccatatttaaaatttaattctaaagtagaaaattttatcttagatggtgaaatgatatcctttgataaagagaacaataaaattctaccatttggtatggttaagactatagctaaaaacacactagactcaaataaagaatcttcttctcaacacgggtttattattgaaacaaactcatttcatccattatatatgatatttgatatcttatatttgaatactatctctttgataaatttcccgctttggcaaagaaagcaatatctaaatcaactctttcaacatagtaataataacactatttgcgatagagttaaaattcttccaaatatagaatgtcaaaatgaagacgatatcaaaaaaaatctatcgttagcaattaaagccaattcagaagggataatattaaaaaacccacaatctaaatatatcccagcttcaagaaacgattcgtggattaaaataaagccggagtatttagaccaatttggtgaaaacttagatttgatagttatgggaagggattcagctataaaggattcttatatgtgtggaattgctacaaataaattcattgaaatagatacaacgccacttaaaaataaaacttcattaaatgaagatcatgatgattctaatgaaacagatgctgaaattgacgataccattaaacacaaaattgttggatttgcttcgttctgttctattgctaatgggatatccaaaaatgaatcacaagagattcaaaaattgacaaaaggcaaatggcataattttagggattcaccacctccttttcatacctttggagataatcgtctatttctaaaatttgaatctagaaaaccacgtgaatggatctaccccgaagattcaataattcttgaggtcaaagctagatcaatagacaataccgagtctcgaatgaacaaatatgctactggatgtaccttatatggaggatattgcaaagcaatacgacaggataaagattggactagttgttatacaatggatcaatttaaaagagatagattattcaaatcagatcatgtaacaaataataatgttatgtattctcaatcttcaaatactagagatgctgcttctaagcggagaagaatacctccgcattttttaatggaaaataaaaagttagagaatgatacagacatcatttcctgtatctttcaaggactaaatttttatattatatctgactattttaatccattcagtaaaaaccgcattactaaagaagatttattaaaattagttattgcaaatggtggatctattgtttataatataatgacaagcagagaaaagttatatcaattaagaatcattagtgatatatacaatatcgaatgtcgaactttgattgaaagaggctatgatattttaagtcctaaatggatacttaattgtgttcaatacaagacatcattaccattagagcctgtctattgttttaatgtctcagaagaattgatggaattagcaaagacaagaatcgatcaatatggtgacagttatcaaacactgatagatgaaccaaaattaaagcaaataattgaaacaaatttgtattctcaagaaaaatcaacaaataaaatagatttggataatgaattgaaatgtattccagttttctttttttttggtaaaaagttctatgttcctgtatggtgccaacaatatgatccgttagtatataatttattgcttcggaaaattatattatatggtggttcacttacatataatctcaatgattgtagtataatagtaataataatgcctgtatcactaaaaacctcctctattgtgtcattcaaagaaaatatcatgaaaatccgttcccatatagcaaatattataaattcaagccccaaatcaattaaaaatattccctatattgtatccgccaaatggattgataaatctattgaggaaggaattcaagtaccagaagaattgtatcctgtacccgaacaattgataaattaaaagttctattcgataataaatgtagttattaaatgaaatgatgtttattgagatactatacattatatattctttttcgttgagtttgaaattacttatttatgatatatttatgaaattaaattattatgcatttaaaaatatcagtattgtttattattcaatctgaatgttcttgacgttccaatgactctgtttcatcaacttctgaactcttctctacattctctgcctcctgtttactattgtcttctatttggttttctttatttttcttcttgtgtcttctctttctcttcttcttattgctttcctctattgagatagccttattaatatcttccttattcttatttccagattctgtatcggtttgtttcttcttcttttttacacttaatggattgggttctttaggtcccgatttccttttccttacttcttgattctttaaatcttctatatcagcttcatcattcttttttagaccggcatacttaggatcgttcaagcctttaaaaagtttctcttgttccatcttcctactaattcttgcactagcatcacttaatggttccataaccataaccgatctatttatatgtaacaatggaacaccaggaactcttcttaatttacgcctcaatttaatatcttgtgtggccaccacatatctatgtttattttcaccatcaacattaactacactttcaatgcagatggctggtgcctttgcatcatttggaggatggttacaacgacgcctttcataacttttagctagattaatggcattttgattttcagtagcgtataatgcctgtatacaacattgtgtaatcattggtttcacttctgcctgtaaagtttgacttaaactttttaccaagttaaattttgacgtagttgcatttaacacgatttggtcatctactaatacttgatatggctgcctaaatttgaaagtatgtgtgtatactaataactgttttctataagatttagctctcttttgacgcatctcgctcttattttgccgttagctataaatattttagttagagaacctgaaactaataaagaaacataaaatttaacgtataatcggacgaaactgctaatattctatatctttctttgtattaaaccattttattcatcatattatttttgtaataacctcatctcatcagttcaagaaaaattttaaattttttttatattaagaaaataagacaaactaaacaaaaaataacaaagcttacttataaaacataacagttgcagtggaagaacagtcttagcaaatagcaagaagtaagcaccatactgtaatccatgttgatccatactatttacttttttcttctctttaagtataattaagttatgtacataaacaaacattatatgtaaaacaaacttatacatctcgtatagtcttatttcttagagtgaataatttatagtaactccaaaaccaaaacaatacaaaacaaccaaatccaagagcacagtttaatagaacccatagatctgggtatcttgaaggaggttgaaacatataatcggcaatgtgaatagccaccatgcatatgtaggacactacaataatgaatttccatacaagattatctggcaataaacttctatgacgataatgggaagaaatattactcattgatggacctggtgtgacactttttggtagaaactttggtgtaacaaaactgaaattaccaaataaccaattatacataataaaaattacggcgtattgtaagataagaccatcttttttgagtattggcatcaatgtgaataacgcaacgttattgatccaaaaaatcatagataaaacattccagtctgatgaaacaaacatcaaagtgataggtaacaaggggactaaaatagtcttttcatgaacttgaaaactgaatagataaaatgacatcgaacaagtaatcaatgcgtatggtatcaaatgcttctttgtgtgtaatagaataataataaaggagggtaaaaagccaacaaccgtggctaccaatgaatataattttaattgttcttgggtgaaaagtgatctatatttaactatcacattggtgacacaccaaaaattagctactttatcctcaaaaatacctctttcaaatggaaatattctatgaatagactgtagaacgttttgtaaacctgaatcaccgccaaacatgtatagaggcatatatataactgcaaatgttgccagagtagaaatggagatagcaaataatcttggaatatttaaccacttaggatgaaacaaagatttacttaataggatggcaaagattattggagaataatacaaggacatctgcttaaaacatatagaacagacgaaacataccgcagccaatgaataaaattcgtccaatagattattaattgccaaaacagtgaaacccaacatcacacaattatattgaaaatgaccatgatcaattagcattaaagaaggctggaacaaaatagcagctgcagccaagctttgacttaaaggcgattggtttctacgcttacccacccacttagtgaaataaagaacggcaggaatataacagatcaattcactcagcaacaccgtaaaacgcatataacttttaatgccttcgtcttccattccacgagactcatctagtgtaaaccacttaggccagaaaaaggaaccaatcttacctaacaaataggagtgatacgccgttaatggtggataatctaacccccaatattgtagatcaaaccaataccactttgaaattggcaaatgttgtgtaatctctaaccaatgtctctgtgcttcaaagtcaccaaacattggaggtgtattaaatcctgaatatggacccaacccaatcgcagtggagatgatgagaacaaataaaacgataatgtattgtgtcatccattgactaccaggagaacgaaatgggtaaaggaaatcaaataatggagatgcataaaaaggatgcttagattcatcttgttcgtctaaaatttcaaattcatccttgtgcaaactttttgatttcttttcagttgtgatatccttattcctccccatttggaatttctatatttatataatagtgtttcaattcccagatatatttaattgctgcaaggacaaattttgcaactaattaactcctgaatcatattaccgttaattctacattattactaccactgaaaataccattattttctttgtctttataactaactttctactgaaatgttttggatagtttaaacgttcctttgcttttttttttttttttttttttctgtattctcctttgtgcatttgtaaaaagataggaagccacagggaagtaagcaagatggctctaaccgacaaaagaagaagaaaaaaaagtagtagtagcaatatccaatgttggcatattatatctactccttcagatacagataaatgacagaaaagaaaagggataaataaaaaatcggtggacgtaaggatagaagattgatagaatcatttatagcagttgcacaaggcagtggaatacagttctgaacaaagaaatataagatacatacatacacatatatataaatgaaataactaagtcatcatggtgaaaagatcctatgaagaagatattgaaaatgatattgaattaattaatgttgaaaattgtgacttccatacagatcaaaatggaaacaaaagggctaataaattcacaattttaaaagtcccatatacaaacggtagatactattatagaaatggtcaattgagtagaggatctcattcaatagtatataaattgtttaatgaaaatgaaactaagatatttgctgggaaacaattacttactaaaggtagcaagatgttaagaagaaagattattgacgaattagagttatataaattgatctgtagacaaaagcaagtgaatattgttcaattaattgaatatttccaaacctgtactactgataataaaaacaacaacgagaacaataataaggaccttaaacatgatgatatatatatggtactggaatacgccaataatggaacattacaatctatacttcaataccgtggtaatttagacgagatagagaccaagaatataatactacagatatgtggtggagtattttggttacacagaaataatattgtccatggtgatttgaaactaggaaatctattagttgatcgcgttagaagatcgattgccaatagcaagcatgaatatgatataattaaaatatgtgattttggtcattcttttataaacgaccaaagcaaaaattattttgatgatcaaagtgaaatattggggacaccatattatttagcacctgagctagtctgtaaatataaaggcgtgaatatatctgggaagactatcccattaatatctttccccatagacatatgggcaattggtgtaattctatttacaatgttgtataatcgtaatctgtttatctccgataaagaagaattacacaggctatcaaggatggatctgtattcacggattacttctaatatattaaggataccaagtgatggaccaaacataaccaaggaatgtaagaatttgctgatcaagcttttaaaacaacacccattgaaaagactgactttattggaggtgatagatcataagtggttcaaaaatggatttattaaagagatcaacttgttggctcctaatggaggagaattaaagaacaggaaaagaaacaatcaaaacgacaatgagataaaagaatatatagatgcgttgtataaatacgggtttgattcgttattgaatggatacaagaatgtgagggatggtggagacaagaagagcattaaagatgatatattgaagaatctaaaaatcaatgttaaaagggaacataaaagaagaatatcaatgtataataatatcagcaaccacaacaacaacaatagtattggaactgttttgaaagagaataaggtacagcgtgatatcagtaaaagaatcatagtagatgaaatctatgtaactctacataatctctataagacagaatcgaatgaaaatagagaagaaaagaacaagaattcgaataaagaagaaggtaccagatctttgatcttaattaagaaatgtgaagaaagatcctatggtgatgacgatacaacatttttgtatgagatgacgaacggacaagttggttgtttatttttggatgatgagcatagtatattattaaatgatatgaaatctacattttggtacattatacctgataagcaaaatggatgggtatccaaatgttttaaacaagaaatagatattgatacagatgcgataaagataccaaacgaattgaataagagattgcaatacgttaaagattgtaaacttgatatggatttaaatttaaatatggatatgaatatggatatgaatatagatatgaatataaattgtaatgacaatgtcgatacattcattagaaaatacacgatatacggtgatagaagagaagtcaatgaagaaaagataagtttaaagctatatatattgagtgataacggaacatatcaattcaatttcgaagaggaaagaattattatagtgatacaaaactttggtgaaattatcacaatgatagattatgaaaatagaataacaatcacggatacgtactataatatattattgaacaatctgaaaaatgaggagaataaaaattctaatttaatgaacatgaaaaaaagattatatgataagatgtttataattaaagatgtattaaaaagagaaatgataaataatataaaataaatatacacatgtatatgtatatgtatgtatgtatgttttttccttttttcttttaagtatactgttattatgaaaaattttcatcagaagctaaagtttgtaaattccattcagtttcaaaattagttttaaatacagccaatttattaataatattattacaagcattcttcaaagcgtcccttgggtcgtaaccttctacagtctgtattctcattttgaattttgcaaagaagggatgctctactttataagcagcaaataagacttttttatcatttaacagttctgctctaattagattacctagggtatggtcttctttattaaaagttattactatagcatttggagacttggtgtctggatcgatttctaatttggattcaccttctgcgagtaagaacaattcaaatctatctggagcattcatacttatatcaaaaaaaaaaaacaataaaataataaaaaaaaagaagaaaaagcaaaaggattgaggatcactaaacaaataaaaaaagatccaactatgtctctgttctatcttatcagttccagttcaccttgagtcttatacaaacgtatcaccaatttacatataaatagataaagaaggatttacgtaatacttcacctttattattattattatcattactatgattttttttttccaacatttcagtcccattgctctttgctcttctaaaaactttaattttccaagaggcagaaaaaaaaaaaaagagagagagagagagcgagagaaaaagaaacttttttttttaagagagaaatatccatccatacatcacactctagttactataaagagagagagagaaagtgcatgtttatataaatataaatataaatatagatatagatatacatatgtatatctatatatgactagtatctgtaattgtctgagattggtttatgtaattagctactctgtacaagatagtgcaacattcacgagaatgtcatttttgtaacaaagcaagaatacaataaagaaaaaaaaaagaaggaaaaaggaaaaaggaaaaataactaatctttacatatcttcgaatcaatagacctctatgttgcttagttattctcttttttctttttctctctttctctatctatctgctactatctgtgtatatgcttttaaggtgtattaactgttgtgaatataaaagaaccttgacgtctgatttttttttttatttgccgtagactcggcggttaatttttatttttgtttctttttcctttcccccccctgcttttgcggtttcttttaggtttctatttccgccactgcggtttttgtcttttccaaaaaaatttttctgtatttccttttttgttttattccgttggtttgttctctgaaaatagaaagaatcagaaatcgaaagattcaaaaggaaaatttgacatttattactgcattccaacgtcgaatacacaaaacaacaactcagttgtatgaacattgtacagactttctgcatctgatgaaattaaaactattcaattctaacactgaatagtaatatcgtctgttatattatttcaacttttcttttttttttttttccttctcttcctctcttccttctttttcataaacacataacacatacacatacaaaagcattcaactatacatatacatatacatacatacatatatatgtatgtatctaggatatttttctaaatttaacatccaagtccttcctccttttttctttacaatttcttccactgtttcataattacttatcctagttaaataaatcccgtcattcctctccgtaccatgaatcaagatattaccaataacaacgataataacaataacataaataggtataattcaatcccttctatatcacatacattatcaaacacttctatttctgcttctacttctgcttctaataccactgctactaccactacagccactacggccaccgcgggtcgtaaaagaaaatctagtaatgggttttctttagctaattttgataaccctttacccgctgatcaacagtatccacactctacctctacctcttcctcctcttccacagcttcttcttcttatcctcaaccttctatccatattcaaaataatgaagatcataacaatctacaagcacaagcacaagcacagacagattctaattcatatagatcgttaaacgtaaaagatgcattatcatatctggaacaagttaaattacaattcaattctaaaccctatatctataaccaatttttagacatcatgaaagacttcaaatcacagaatatcgatactcctggcgtcatagaaagagtgtctaatctattcaaaggatatcccatcttaattcaagggtttaacacttttttacctcaggggtatagaattgattgtactaataacccagatgatcctattaaggttactactcccttagattctgcgtctaccaccaacaccaccaccaccaccacagctatcactaacactaacacctcgacttttacttccactttacaacctccacctatcgctcaatattcttctaatcaacatgttgttcaatccaaccaattaccattacctacaccggtgattccaacttcctccactgttccttccactattccttccactgtcctccctacttcatcaacatcaaccgttaaaaagccaaataatgtcgagtttagtcaagccataaactatgtcaacaaaattaaaaatagatttgctaatcaaccggaagtatataaaaacttcttagagatcctacaaacttatcaaagagaacaaaaaccaattgatgaagtctattcgcaagtcactctcttattccgaaatgctcctgacctattagaagattttaaaaaattcttacctgactcaactgtttcagatcaaccatctcaaccccaagtatcccaacaacaacaacagcagcaacagaatgctggtatttatccaaatggtaactatttgtatggtggtgcctccacatattatccctctggatcttcacaaaatggtactcctggtccttcaaattttaatatcccaagaaatcaacaccaacagcaacaacaaaatttaccaccaattggaagtttttcaccaccttcaaatagtactaatggttccttacaagatgagtataaaactactgaatcccaacaacaacagcagcaacaacctggtcaagtagttggcttgcccccaattgtagctaatgaccaatctttagatcacacatctgcttctttacacaatcagtacattaataccactcaaacgactaatgataacttaccgatctccagtttaagagatgaaagtggcccaatggataatcaagttaggtatgcaactcaacaacaacaacagttacaacagcaactacaaatgcaacaacagattattatggaagatcaattacctgtaaggccggagatcgacttagatccgagtatcgttcctgtagtacctgaacccaccgaacccatagaagctaacctgactttaatggaagaaacaaccttctttgaaaaggctaaaaaattcattggcaataaacaaatctacactgagtttttgaaagttttaaatttgttttcacaagacataataaatattaatgaactagtagataaagtcgaaaacttcctaggtggtcaaccagatctatttaattggttcaaaaactttgttggctatcaagataaaccaaaaattattgaaaatatcgttcatgagaaacataagttggatttagacctatgtgaagcatatggtccaagttataaaaagttacctaagactgacacatatatgccatgttcaggtagggatgatatgtgctggcaagtgctaaacgatgaatgggtaggccatccagtatgggcctctgaggattctgggttcatcgctcatagaaagaaccaatatgaagagactttgtttaagatcgaagaagaaagacatgaatatgattactacattgaatccaatttaagaactatccaaacgttagagaccattgccaatagaatcgcaaacatgacccctgaggagaagaaaaactttaaattaccacctggtcttggccacacctcattaactatttacaaaaaagttatacgtaaagtttatgataaagaaagaggcttcgaaattattgatgcgttacatgaacatccagccatcactgttccagtggtcttgaaaagattaaaacaaaaggatgaagaatggagaagagcacaacgtgaatggaataaagtttggagagaattggagcaaaaagtttatttcaaatccttagatcatctaggtttaacttttaaacaagccgataaaaaattgttgaccaccaaacaattggtatctgaaattagcagtatcaaagtggatcaaaacaataaaagaatgcattggttaactcctaaaccaaagagtcaactggattatcaatttaatgattttaatattttttatgacattattagattggctgatatttttattgatcatagttcaacctattcaaacccagataaacttagattaaaagatttattaagaactgttatatcgttgttttttttcattccaatgaaaactataaacgatgcagttaaggaaagatctaaagttgatgatcaagatgacggtaaaagttacaaagatgttgaacaatctaatgaaactaacgattctaagatgaagagaactagagatgatgttgaattcagtttatcagatattttccataaagctaaatatcaaaaattgaaaaattcatacaaagaaaatgatacagaaagcccgactgaaggtgacgctgaaaagttagctgaagaagctgaccttttaaatgaacaagaagcaagaagaccttggttgttaggtaatatgatctatactgctgattcttgcggtgccatttccaataggagaatcttcaatatgtttgcaaatacaaatatttatatctttcttcgtcattggacagcaatctatacacgtctttatgaaattaaagaaatgaatgaaaaagtcacaaaagagattaacagtagaaaactagtgcaatttgctgttgatttaaatttactttctactcagttaagagatatgggactcgactttatgggtaaagatagttaccaagaagtgttatcaatgagtaagagattaattgaaaataaattagaacatcaatggtttgaagaaagtctacgtcaagcattcaataataaagctttcaagatgtacactgttgataaagtcactcaatcattagtaaaacatttacattcattaatggctgatagtaaaacttccgaaatcatgttattatttgaaaaagatcgtcattcattatctaccagcacaaaggatcaaattttgtatcgtctacaaacacgttctcacatgtctaatgtagaaaatatgtttcgtattgaatataacaaggatacacatcatgtatgtattcagtatattgcattggatgatttaacactcaataccaagcaatcgagtgatacggataagtggaagtactatattacatcttattcactacctcatccaacagaaggtatcaatcaagataaattatatgcacctttcctagaaagaatacttgacttcgaaaatgaagctttagatgttgatgatccagcaaatagtaaatactctccagaaggtgtatcacattcgatattgaaaatcaaaattgataaagctacatatgctatggaaattgaatcaggttcttatgatatattttccagaaaaagcatcaacagatatccaattaaaattaatgagaaaacatttaaaaagtctttaaagaaaaagatagatactatagataaatttctaggtagtcaatttggttggaaacggggcttgggaaacatatccaataatacttctgtttctactgcagtaattgctgagaagtctgattctagcagtgtttctgcttcatcttcaactgaaaaagaaaatattgctattacctctcaaaattcatgttctatacccgtaggaaatgattctaataattaatttatcaatacagatagggcagaatgagaattttgaagtttaaagatgacaaattgtatatttatatatgtctacattatgtatatcatactattttatatagttgtgtttttttataaatgtatataagtaatgatgttaaattatgaatttctcaattaatttagtgaatgacataaatatttctgtaaaattaatatataatctcatactgttggatgatgaagtgatagtagagaaactatctacaaaaaaaaaacctaaaaaatggctaaactacaaacagattacacatatacacacatattcactcttcatcaacatctactccaaaatcttgtaacttttccccccattgatttatccagttacttctatttataacaatattgcttgcagattcttgagtatcaggttgagatggaacaacaacagctgatgatctattacgaaccacaaattctccatcctcaaatgtttgttcaacacttgtattttctaaattgactagttttctacctccatcagatggccatggtaaagtcagaagtaaatcttcaattgatagattttcttcatatcgagaaatatcatttgtactgaacctcataccatcacctcttggtttgttgaaaggccataatagtagatatattggccctaatgattgctcccaattttgccgtataccaatatcataagggaaatttattattgattcaaatcttacttttttgtcattagacttttttagaagtaacttagcttcttctcgcctttcagtagtgttctcaaatggatacacgtcccatattctttcaatcaatagagggactaattttttatgataaaataatgtttccaatctatccatttcccaagcttcaatttgtgtccttccatgtaatatttgattattgacacaacggattagcaagatagaaatagttaaccatataaatagattaaatggaatcaggatagtaaggaaaaagaactccactctttgaaacgaaatgttaaccttattccattcattccaaacatgaataacgcttttaaaaaaataccaattcaattgactagtcgatataattatccataacaaaaatctgatgaaatgaggaaaattgttgtaacctacacaatttaaagtccagggacaatgatgatccatcataagaacgcactggttacatgttttacaatgatgtgttctttctggtttaaaattattgcacttatggcagaatttcgtatcctttatcttatttagatttttaatattacacttgttgttatttagttctgaattatttgatattgatgagggtctacctggattagtaaaaatagctgacaagtaagagaaccatatcatagttactgaaaactcgaatatgaactgacctcgtagagagacaaaattagatagaataaaatagtgtgcattatatgaaataaatgtaataattgcagtcggtatggccacacctagccaaggccatttcaattgtggagccatgaaaaagtagcaattgtcgattaaaatacctaaatttgttaacaaagcttcatatgtatctgtttatgtacattgataggtgcttttaattaaacgtttcaacggttcatctgttgggaggttgtactcgtatttatatttgtgtaatttttgtactggataaaaagcgatgtcaaaatcttttgataaatgaaaatgagtttagggtataacaaataaatgcatatttaacagcactggtactaatgacaacgaaagagccaacaacataactgcaactgctctgcatttgaatctattgttataaagtaatatataattgaatatgggatgattttgcagaaaatcgaatcgatcatttgtaatgaactaataaagtatgagtggacaaaatgcatatttatagaaagtgaaaagaaggaacagaaaatggaagtcagtgagaatagtacgattcctcttacatttttaaaaatcattgctacagatccaattttaatattttgttttgtgggccttcctatagacattaatgtagatgaacatcttgaaaaggctaatggcaacgaacaatgtgatacattaatatatgctttatccaaagagcagataaaacagcaatgcgaagaacaaggttatatggacctagcttatgactcaatttggactaagattctaaaaactgatctacagagggaatacctgttaaataatacaaattatgtgatatcttttatcctgctgttatcatctgagttacatttgaaattaagtgtgtcattaacaccgtgcaattcactatcttttggttgtttatcaattttacactcaaatctaatgaaacaacttgtaattactactactcttctatctaatcaattaaaggttcaagattgtattttaagaaagaaagatgagattattggatatttaaaagatactattattggtttaggtgggtcgcaaattttaaataaatgggcacctgctggatccaataactattgttgcatgcaaaaatatgaaagtgcagaaattcagctccctcctgatataaatgtacaatgggtagaagataatatacaaaatatgatgcatctatatttaaaatttaaagataacaaatatagaaaagatgattcttttggctttgggaagaatgttaatgaaatacatggaaaaaaaaaattagaggtatcttcttcagaatccaacttatatgttaaaaaatcttctagtactgaatcgagtagtaatgaaactaatttattgaatattgaaagaaaccaagcaaagaagtctaagaagacaacaaggctttttggtaaagttagagtatccaaagattcctgagtatttgataaaaacttaaaaacagtgatcttgtactattatcatgaaatgtatccaatatatgtatgtatgtatgacataattgccattacaaacacaaaacctctaatgaaatgaatatgttgacaataataaaaaaaatatatgtattcattcatatatagatatacacatatatctaagaaataaatatacatatatatatatcaataaatattaacacaacagattaatatttataatgattttgattttagtaaagaaatcctcataaagaagataatagaaaaggattaaaataaaaataaatgttgataataaaaataagaagtaataaaaaaaacttttattatatagagatgtaaaataatgaaaacattgtcaaaaaagaatccactctttttaaccttcttctttatttcaccatcgcctatataataccaacaattatcccccttttcttaacgtaaacgtctagcttcacgttcggattccatcaagactaagatgtcattttctctgactggacccttaacatttctgacaatagttctagaagtgtcttctaaaaattcgacacggacttgggtaacaccaccacgagaaccggttctacctaaaactttgatgactttagctaaagtaactggggtcttggaatccattttgctgccttgctgggatggaatgttggggtagatgtgaagttaagaaaggtaggaacgaaaggcacagaaggagaggctaatgaataaagggctttcttcaaacttgcttgaagtcaactaacgcaacttttctaacagatagttcaagagaaattagtagtgagtgaaaagtttatggaaagtatccttgagttgcgcaaagttgaatggaaatgaaaacgagagtgaaattttgattacaaaaatacgagaaaaaatttttttcaaaaaaaataaaaaaaaattgaatttgaaacaggaaaaaaaatttttttgtgcgtgggtcacgtcgtacggcgagaattttctaaaaattgaaataagtcattttgattccaatgtaatttggttaccatattttcaaaattggtgactagtgaatcggtgtctctttgaaattcttcctgaagatcttcgatttttttagtatatttactcaataacggtttaattaaagcctgcttgacttcttgattgatcatattcactttgataacaatatctctcgtgaatatatttacagactgctcgatttgttgttgcaacaagttggtaaagccatttggcggagtaacagtggatgatatggttgctttgcttttggatatcgcaggattgtcgatatgaatgatatcttcgttatttgtattctctacattatttaatttgctcttttttgatggattagtgggtgtactattagtagtgcctgtggtggtggtaacattagctaatatagttgtggaatcatcattaatcacattagttttttgtaaagtgctagttttttcttcttttacagttgttttatctgattgaggctgtattaaatccttttgaacatctaactgagaagattcaatagtaacaacaggtttatagttatccaaatgtccttgctttaaagatttggaattcttacagctgacgttaagactttttttatctttgttctttttattatattttaaattgtttggaagtttttcaactcttgattttactatctttgactctttgtagttatttactttattatttgctttcttttctgtattttcaatcttgttatctatataatatttcttgaaactcttttttgtattattaggcggtgatatttcattgcactttgttatcagtatagaatcctgtgatggtgtcaaattaccattcaattttaatattgtttttgaagtgcttactctatacttattattttctgcaaagggggaaagaagagttatagtttttaaattttcgtgggatgaaagaatatgggtattagtgattgaagaggaaatagtagtagcagaagtggtatcattatggacatagtcatttttatcaaaaagaaaccaaaagttattaatttttaaaataatctctttattatgtttctctgtatcattttgatagtattgaaaattatctatttctaataatattccaattgaatctatataaagatataaagagttatggataacctgtacataaatggggcccatataacgttctttattatttattatgatttgatctattttatgaaccattaaagagctaaagtcaaaactatgatctgtaaaataatttttttgaattatcttaagcattagataacttggaaaatggttcaagttaaagggaaaatggtttaaaagttccaaaaattgttttgataccagttgtggataatcccttgataagttgcacacgataattaaaagcttccaatttttgattgaaatattttgtaaccattggattaaaattaaactgtccaattcaatatcaacaaccaatttatcgaaatgaaaatattttaggatataattgaatatttttgaattcagattactagatttgattagatcatttaacaattgcaaagatttgatatagtatggtccattattctgtactaaacattcgtacaaggtttcatatatttttagatcaccatcactctgaatacatatttcaatcaactgttcaattctttgttccatttcaattattattattattattattattattattattattattattattattattattattattattattattattattgtcgttgttgttgttgttgtttgtaataaaaggatggatgaaagttaaaaggtgtttattcttcagcttttttaaagacgttactctagaaggttaaagataatcacatctttggagtgctttaaatacacaaatatataaacttatacttatataactactattataaatctatattagccgcccagatattgtgtctttctacatacaatacaaatatacaacagatgtaaggtgtatgggtgtagaaaacccttgtttttcttctcttttcttttttgttcttttcaacttccaaaagaagaagaagcagcccagataacaaagatgtaaggatgttgcagtcgttgaaattcagttgattcttagacggtttgggtaaataaagttatttgctaagattgaccaaacatatgttatcgtacacttctgtatgcgtgcatattcaagtatcaggtccttttgcccaatagaaactccccgtctattatttattaaatacacatatttactattactatcattacatagagatatcagtaatatatagggatgttcaatataatatactttggccagcaaagtaaagtaaagataataaataagacacaaaagaagagaagaagaaaaaatgaaatgaaataacgtaaaaacaataacttgtattgtaggcttggaatcacacataactttcgagtatatttggttataaacctgtgattatgtgtttgtaattttttgattgaattattttttattttatttaatatctttttttttttttgaatctgaccatgtttaacttacatcgtgaatttgtagataaatatctcaaagaggtaggataaaagatgaaataagaaaaaataaaaaaagaaagagaaaacagagaaaaaaaaaagaagtaacttatgaggatggagatattatgaatctaatttttagtattctttaagttagtataattcagtcaaaaaaaaaattgaaataaaatgaatattatgcaaggattctcatttaatttcataattggacattacaataatcatatgttatatcaaatgtagctatatttgtatttgaattacctatttcgtttattgatgtgatagtttcattatcttcattatccagataactattttcattgttatagaaattttctctatcatcccatcttttgtcaaaacataatagagtgtccattgaatttgtttttgccaaaaagttattgtatttataagggttattgcactcatctgtaggtatggtgttagaagtagtaatcgcagcagtgttggtagtacttgaatacgtacctgaggtgatattattggtattgttcaaagctggtgaaaaagtataatcataatcataacaatcaaaaaaatattccttttcactatcatctgtatcccatgatgataaatcagaatatgaagacgaaagtgacggcatactattatcattaatggtattattaatggtaatgactgaggaattgtcattgccactactattattgctattgttatatttgttcattaatgtatcataatcggtttcttgcatttgatcatcgataaagaaggataatttgttttggtttttaggatgaatccaatatgtatcagtatggaacatgtgttttaatggagattcattatagtaatcagtatcttttgaaaattttctggtgacaaccttatctctattttttggaatagtgctattattagtagtagctgccgcagtagtaataattttatcggtattaatattgttattattcttatcagtgttgttactattgttataaatggtggccatagaattgtttaactttggcgaaacattcaaattcagtataaagttttgataattattgttatcataataaactgagtcattaacattatacatgcaaacaaattctaagttcaaattattttgattatttatcatgacgttatcgattaatttatgatactccaagaaaaacttccaagcgtttaaatcaatatcaaagatgaaaatatcttcatgatttgttggagaatacgaataatctgcctttatataatgaatttgtttccaattatcaaatgtaaatttacattgaataaatttttcatattgtaagttacgtactttaattgtaccacgtataacattatcttttactaaagatatattaattactttaatattatcatatgggtctaagtggtaatagtcattatttttattatcaaaatttgaacttataatgcatgcttgaatatcgttgttgtagaaattggtcatattaaaagttggagattcaattatattattgaaggttaagagagtgttagcatctgtaacagtattagcagcagaaatcgcaggaatgacacccgttggagcattagtatatgttagatgataattatcaaaataatctaaatcaaaatcatcttcaatgtcatcaaaattaaaatcccatagattctgtttgctcattttattagctggtgttgtttcagtggcactagtaaatggtgagatattatcgattggataaagtacaggagaagtttcattagatatactgattggttcatcgttaatatgaaaacttttaatagtagttaactggggagcgaatctaacgaacttatacgtatttgaagaacttggattggaagaaaacgaggttgaagatgcagatgaaattgatgaagttgaggatgttatggaaggagataaagagtcatgacgtgataattttagtgatgatttcaattttttcataacaatttatctataaacctatctatttatttatttatctatctatctatttatctatttgttgaaattaataaagtaattgtaatgtatttgttaggacgttacttttatgattacttttattatttcttttagcagtttcttttgtagaaggatacgtgagagaaaaatctatttaggcagaagaaatatgattatttagaaaagatattatactatgtaaagaaatgaaaaaaggcagacgatggccaaagatgagtgtgggaggaaagagttttaaaacgttaagatatgtaatattgagaaagcacaaacatagatatatatatatgtttgtatatatatgtatgtatgtgtgtttgcttatatattctattattctttcctttgtgtttttctttttcctttaataataaataaatgacaggatgaagttgagatcaatagaacaagtaaaaagaaataactaagagcacctatatcaacaaaagaagaactacaaagagaaagacaaaagaatttagatatatgaagaaaagttgttaatataaacaatagcataaatagaggtgaatataagacacaatacatttatacattgaccccgtaaacaagtaaataaaaaaaaatgtgaggaaaataacgcgagaaaatacatacagtctgtttctgaaaatgtacataagtttaaaatatatatagagagagggaacgagataaataaataaaatatagatgcataagatataatacgttctccttcatccgtgacttttattaaaaataatgataatgtcacaaagatttccggtttgacaaaaacaaaaaataaaaaaaaactaaaacaatagttgttaattcaacaaaacaaccaaatatatctttttttattttattgaatacatattgtattcgtgtatctgattgataataataggttctattactggattaggaaaacagaactcctatttttttgttttcttaactgcaacccccacgaatactattgtgttatattattgtgcttcaacgtggaggataataagagaacaatatctgaatttcagattttttaatagccagcattaatgattttctattgtggcttatttccgccgaatcttgttatcatagattttttagaattttattaagcaagaaagactttcaccatcatagaacatgataactcgataccattttctttggggccacattcacctattcttattatttgtatttacatattttgtaaagatggcaaaaaaatttttttttttttttgatttgtttgtttgtttgtttatatttttctttcttcttttccccttaaaaactctcttttatttgtttacttgtttcttttcttattgttgctgttgttgcaaaaaaaaataaaattagtaggaaactattccgaaactatttcgcactgaaagagctagcttcacatagaaaataaaaagaaaaaaacagaatagttccatggtacaaagaaataaactaaaagtatcaaaagtttttttttttatttctaacgcatgtaccacaaaactagcaccaatttcttatttagggataatagagaagtaaattgtttttgtgcacatacattctttttttttttgttagagaccctaggtattactgttgtcagaaaatatgaaagcaataaaaattcacaagcttctctatagatatcattctactagatttaacaacagtattgatttacttttattatcttagttttggctttctatcttccggtattgagtcgtttttagttactttttcgcaaatcattagtattaatatcatagaaagtatgattattcataaaggggaattcctagcttttgattccagagctctataaatggactgttcagaacattaaagggattctgccattatattattatttacctccattagaatattatattgtccgaatctttcttgccttttcctttttctctgtttttttttgtaggtcttcctaatttcttttgtacatacataggcactttatataacatgcaagaatgacataattaacaactatttttaacaaatggtttgggtagtaagaaatgaataaagaaaggcacaaagaaaagaaatggtaagaaaatcaacaacaaataaaggtccttgatattgttgaagtatgctacttggatgattttatattttatctattacagtattcaacaaaaacaaattgtgcataccaagccgtaactgtaagtaggcatattttgttcatgcttcaataccgaccattaattggttatccttttcgcttactcatatataattactatcgccgttaaaatattttgtgtgtaaccaatagagcagttggattacaaagaaataacaaaatagtaagtcctatggagaatcaaagacaacaaacaccagaggaaagaaaatatcgttactattactgaataattaaaaataattaatagaaatgaaatcatttactcttatttcgtagtcaatgatatgtcacatttgtttatatcgttggaaatgagttaaagtttttctttttttattttctttttttttttttttttttcttatttttctgtgaattcaagatgtccagacatagtaaaaagataaaaagaaaaaattaaagatcatcgaattagtttgtaagaatattgcatcatttaacagaaacttatattatatttaattctctaatcttcagtttgtgttcactcattatcccctataaattcaacaaaattaaagttatctcatataagcacgtacacacatataattccgtactggttgatattacttttatcttatttttttttctgataaactgtatacattatgtcttttgatagtccagaaatatatagtgcaccagttttacaaggtcaaactccaaacgatgatgataatacacagataattaaagcctttacaaatttcctattggattttagatttaattctcaatttatttatagagatcaactaagaaattccattttaattaaaagattcgctttaactttgaacttagagcatttaatctcttataatgaggatttatacaataaattattggatgatccgtcggatactatacctttatttgagatttctatcactcaagtagctaaaagaatgattattttaaatagaaatagtaataacagtgataataataataataacatgggtatgaatattaacaacaccgatatggaggaatcaaataccaataatttaaccacgtcatcttctagtatcgatattgatccaaatttaattccaaatttccaattaatacttaattcaaactcgaaccaaattagcttaagagatttaaattcttcatatgtctctaaaattatcaggatatcgggtataataatttccacatcagttctatcttcaaaggcaacgtatttacaattgatgtgtaaaaattgtagacatacaacttctttaaatataaataatacaagcagcggtatgagtaataataattttgtattgccgcactcgtgtctgtcaaataaacaaaatttgaataacccaaactctacaactataacaaacgataataacactaccaataacacaaattgtggtcctgatccatatatgattatccatgaatcgtctcaatttatcgaccaacagttcttaaaattacaagaaatccctgaatctgtaccaatcggtgaaatgccaagaaatgtcactatgtcttgtgatagatatttaactaatatggttgtacctggtacacgtgtcacttgtattggtatctattccatatacaactccaaaaagtttggttcaaacagtgcttctggtaataatggaggtggaaatgctgtcgctattagaacaccttatattaaagtattgggtattcaaccaatagtagacacgaacttaaatcttcatatgaactctaattctatatcatcatttaatacattattcactgaggaagaggaagaagaatatctgaagttatcccgtcaaaagaatatttattctttgttggcaaaatctattgcaccttcaatctatggtaatgaggacattaaaaaggcaattttatgtttgcttatgggaggttctaagaaaatcttaccagatggaatgagactaagaggtgatataaatgttttgttattaggggatccaggtactgctaaatcacaattattaaaatttgtagaaaaagttgcccctattgcagtttatacatcgggtaaaggttcatctgcagcgggtttgacagcaagtgttcagagagatccaatgacgcgtgattttttcttggaaggtggtgccatggttcttgcagatggtggtgttgtctgtattgacgaatttgataagatgagagatgaagatagagtagccatccatgaagctatggaacaacaaactatatctatagctaaagcaggtatcactacagtcctaaattctagaacaagtgtattggctgctgctaacccaatatatggtagatatgatgaatctaaatcacctggtgaaaatattgacttccagacgacaattttatctagattcgatatgatttttattgttaaagacgatcataatgaggaaagagatatttcaattgcaaatcatgttattaatattcacaccgggaaaatttcgcaagatcaacagtatcaagaaaataatggtcaagagattccaatggaaaaattgaaaagatatattcaatattgcaaaatgaaatgtgcaccaagattatcgccacaagcagctactaaactgtcatctcaatttgttactattaggaagcaagtattaagaaatgaacttgaaactagtgaaagatctacgattcctatcacggtacgtcaattagaagctattattcgtatcactgaagcactagctaaattggaattatctccagtagcacatgagaaacacgttgatgaagcaataagattattccaagcatctactatggatgctgcatctcaagacgctagtacagcattggctaattctgctggtaatagagccaatggccaaaatggcccaggtggtaagaacttaatggcaagtatacgtttggtggaacaggaattgaagagaagattacctatcggttggtccacttcttaccaaacattgaagagagagttcgttgacacgggtaaatgcacacaaatggctttggataaaactctatatattttagaaaaacacgataccattcaattaaggcatcaaggtcagaatatttatagaagtggtgtttaagtgttgtgtatttgtttgtcattatccatatatagcaggattgtgtaaatagataaatttatattgatgttaactacattttttgtaattttatagaaagttgtaaacctgtatttattttattattattattattattagaaagaaaccttgtaataatatattttaacacaaattagttttgaggagatttttttcaccattgatttatattaaaggccactattagactttggttttaatgatattgtctattagctcttttaattgcattacggagaaatagaaaaagttgttctaatatacaaaagtggaaaaaaaaattgaaaaatgaacaattttgtataaagaaaaatcttgggaataagtggccatcgaagtactatttaaaagggagactattattttaccggacgctagtctgcttgttcaaatattgttaattatatatacatatacagatttaagttttttggtaaaattatagcacaaataataaaattacctaataggttttgatacatatttgttcaaatttggagcttctatttttgctttgtttctaaactacaatctcagatacaaaaaatatatcatgacgtatgttgaactcttattccatatgtgaatgtggataatccttatttgtttgtttttgattgagaaattattttgtttaaaagttcattagtctattttactaacaacagtttatttgatatataacttatagtatttatttacagtgaccaattattagatcgtccaaaaattgaattaactaaggaagaattgaaacagttggaagaatttgagtttaaacatggtccaatgtcactaattaatgatgctatgttatctagaacacctgttataatatctttgaggaataatcataagattatcgcaagagtgaaagcattcgatagacattgtaatatggttttagaaaatgtgaaagaattgtggacagagaaggagaagaatcaaactgtgaataaagagagatttataagtaaactatttttaagaggggattctgtaatagtgattttgaaggcaccagtacaataaacaaaaaatacaataataatggaaaatagaaggaataagaagatacataagcacatttggaaggatgaaatagaccggggtttattaaaaactaagaacggcagcatatggaaataaaattttcctacttcgctctcacatatttttatttgagatttcgatagagtctgattatttaataagtatactatattattattatacaagttatgcatgaatgggcatatacaaatatatgaaatgcaaagttttgatatttttttttgctatgatttctctcagggtgtttatttgaagttcttgagtggatctgttttaacacttttacgtttcgtcactttgcctttcttattgtgacgaccattctttttaggattgctgtaaggaataaagcctaacttcttcttgctgagttgttttctagcagcttcgggtaacaaatattcaggtattctctttaaatgttcttgtatcctggctggatgtaattctttgtcgtgtcttaatgtttgtaattcatttggattttcttcaaaatgtcttttcaacttttcactagttaatagttcttctcttaattccttgattcttgcttctctaactgcaacctgagttactgcacggaacccatcttctagtctgtaacggaaaccttcgatctgttttggatcaaaagagtatggttgtaactcaagacctaatttaccttgttgtttcacaattctggaaaaaatcttttcatctctctttgctgttggacatgaagatggtttatgtttgccaaattcttttaatggaaccacaaacgatatggcagtaccagttctaccagcacgcgcagttctaccaatcctatggacgtatgattttgctgtagttggtaaatcaaaatttaaaacacatgccacatttttgaaatcaacaccacgagatacaccatactctttatctttcttaatctccatagatttatttttcttcttattgccctcagcattagatttattctcatcaactctatcattagattctttcatattattttcttttaagttttcttcttcttcctcatcttcttcttgaaagtattcagaatcatcagtagcgatcaataaatgatataaattcttgttgaattgatccacaatatgttgtcttgaattggatggtaattcactatttaggatgcacgatttaataccgaattgctcaagaaccaatttcagtctatatcctctatcaatattattgacaaatatcaatgtctttcccttaattaaattcaatttaaaaataacatagcataataaaaacttatcaaattcagaggttttaacataatattgaattaatttagtcttatctttgttaatttcttcatcattgaatttcaatatagctggagaacgacaaaattttttctttaaatcttggatatcgtcgtttaaggtagcactcattaagaaagtttgtaagtttttcttcaatggcaaatattcagcaatcttactcaagtcctcttgataaccaaaagttaaaactaaatccacttcatcaataactaaaaacttcaaattatctaaggatatggaattaattttagtgtctaataaactagttaatttacctggggtagcaataatgatctcagggttttctaaaagtaaagtattcatgacagaagatggtaattctgcagaaatattcaaacttctaatatctttggaacaatacacaatcattttttctaaaacattaaacacttgttgagcaagttctctggtaggaactaatataatacctaatgtattactctcattctgaagatctgcgcttgattcatttttcttataatccagaatagtttgaataacaggtatcaaataagacaaagtcttaccagaaccagtggcagctttagcaataatatctcttttttgttggagtgctaacggaatagcatgggattgtattagtgtagggtgagtaaaaccagctccctttaaagcctgtagtaatcttgagtccaattggaaagattcaaaattgacagaatcatcaatgtaaacatcggcagccaattctttattattttttttgctcattttggacatgtcttgttattaatttctgttattacaaaacaggaaatagtaagaaattcatataaatctaggacttataatacaactcaaataacttgtatggttactgttcagctaaatatgggatgagatgaaatgatcttctttaaaaatttaaccttcagttatttttctttttctttgtttttttcaaaaatttaagtatttttcgaagtacgttgtaaatgatagagattaaataaaaaaaaacttacttgagggaaattgcacagaatactatattttataatttatatgaggataaccttatttggttgttggatctcattggggtaagttgtgttgaagcttgtgatgttattatagtttaaaaatcattactgattttagaaaattaacaattagattaacaacgacttttttatagagttattttcgttgcaattactctatatatatagatgtacatacatgcatatttatgttctacaaaagatagaattatggtatctcattgttatagttttcgatgattcatactctttttaatgtgtatttatgcgtgtctttttttcaacataatgttgagactaagtcacctccaatacttaatatgctttctaccctaccttttaatggattggagttacattcctctactttcatgctggtgaaattaacttttgctatatgctttccaagagtgattacaccgataatatctgtatttgttttcttaagttcttctcctttttgttcattcaaatttaaagtaaaagcgtcaccaaattgttctttgaatagctcaactacttttttaattttccacgttatttcgtattgttgggcaagaatattttcttcataatagttttcagacttttttggatgttcgtgactgcagtgatgactactcatttttacacttgtaggggcagaatcaacagacattaaaattgcaactactgaatctgcaatagtatcggttactaatccctgtgtccattctacaatggctactgattcaactaatgttacatgtatatctcccataatttgcaagattaattttttatcttccttagatttattttcttgcttttggttttttactatagtctctccagtgatattttcatcatcctgcagtattgtgatatcaccaaacatttgacaaatatgccaatatactaattctttcttacaatttatttttaatgtttgtctttccttcagaatagttgtagataactctgtatgatgttctcttaaatctgataatgagaccaggtttaaatcaaaattcttgtcatcggatactaacaacccagagacaatgatctctttatcaaaattattttcgggtttaatcatttcatcctcaattgtttcttcttttttaacactattattagttatttcgtttgttatatcttttgtcgtggaatctgcctctatcttaatatctgtagtttcctcttcgtgtttaatctcatgaatatcactctcttctttatatatttcatccacaatattaccaatagctttagcaatcttaatacctttaaattctatgttaacttcgactgagtttcgtggattatatacatggacttcgttttctgtaccttttaacgacgaaaaatttgacaatagggcagattttaatctacccatggggttagattcaccatggactaatatgatattagaagcatggattttttcaataaattcaagattttcctggaaatcaacatgtgcagcaaaggatatttcttctacttgacagcgtctagggattgaaatttctggattattaacagacgggattgtgtcgggttctaatattatatatttagccatagttccctcgactgaatagcctgtaattaaaattaaatttttttcctcaggacaccatttttctaataaatctcttgaaataccactttgtaacatcccaggtgaggctagcataacacttggaccaaaatcttcaaaatcgtctaaattcttcaaataagctatatttttgaagataaatgggttcgtttgtgaatttctaaacttcttacgtatatcatcattcatcatgtttacatatgtttgatatacactcatacactttctggccagatcagaggcataatatattggcacctgcccatttcccaattcttcagaatggttttgccagtattcttctaatacaagcattaattcttgtgctctacccaatgcaaacacaggcattaaaactctgccacccttaccaacagtagaatgtataagttgtgtaagttttttttctctgtgtaaacgcggttcatgagtagctgtaccaaaagttgattcaacaataagaacatctgaaggctgtggtggaacctcagcagaatttagatgacgatccacttctctagaataatccccagtgaataaaatttttaatcccgctatttctatctgaaacattgcagcaccaagaacatgacctgcatgaaaggcagtaaatttaataccattgacttctattgtggagtgataatcgatagcttcgatcttgtcaaaagattcaactaaatcttcatccgtatacaaagattcctcatcgcttgttggatccgcaccaatacttgtaactctaacaaagtctcgaagtagccatctatatatagctttagttggatgtgtcatgaatacccttcccttaaatggagttctttgcattacatacggaagtgatgcagcatggtctaagtgaaaatgagaaattaacaggatatcgacggtttctaaatcaaaatcatcataaaaaggaagagatgccattcctttgtgagcagggtgaatgcctgcatctaacataatagtttttcctttgtattgtaaaatatgacatgatcttcctacttcgttaccaccacccaaagcaaaaaacttaaatgtgtgatcagatggttgtgacatcttatgcttttaaagagacttctttttatttggaactaattgtgattcaaatccggttgctttgtaattcttttccacctatgaatgtttctgctgaaaaaaggttctcttgtaaagagacatgatcttagattaaatagaacttgcataataagttttctctaaatactttttcatatataaaaaaattaatttactgaaaagtgaaaagtggttgagaaaagtaacatttagcaaggaatatacagagaataataagaataaaacagatacagtagcaaggaattcaatctttataaaatgaatatatgtgcactaatgacacttgtataaggaaataattattaatttaatcttatcttgtttaaggtataatatactactatctaacttgtatactgttatgtaagaaaaccataatcgtcattaacagtccaaaattcttctaccgggagaacagagccaatattctcaaattcacgatacctaccagggatattttgaataaaattattgtttctttcattattattattagtaaaattgtgggtaatgctgggatagctattaatcacagtagcagatttattattatgttgccaatgttctgagtgtattggtatggcattaaatctagcagtagtactattagatgttgccaatggtttgctagctgtgatttgtctttgataattattattcctcctcattggcaaatcattaccttgttctaaattaaaggatttttgatgatgatgtagtctgtaatgaggatttcccggctgttgttgtatactttctgtaataatatgattttgtgttatctggtgagattgggaagagtaaatgtctatatcatcattagtggttattgacacatcgtctactagagaatcattagtccaatttgatatactgctgatcatattatgcgtccaattattgatcaatatgccactccgtgttctaataagagattgcgctgttttagaaacatttggatcgatcggagtttcgttcttagtatgcttttcaagatttggttcatttacaacattagaagattcgtttggattttttgttactatgttaaatgtatttgtagggtttgagtttgctaattgtggtataagtgtgtaattattataagagttgtttgaggcaggaggcagtataatatgtctgttcccagctaaagttgtatttataggattggtgtggaaattattgtcataattagattgcatattcggaatgatataagtactcatgggtttatatggtgcatagttaaaggaagaaagataattttgtaggttctgttgggccacctgttgctgaatataggcttgatggtggaatgttttccaatctaagtcgttattatttagtggcttctttacaacatattgctgttgcttttgttcagtagagtcgggattaattttagtattactggtatttcttattttactgtcttttctttcatggtttagtaaatgggcgaggcttttaggtagactatgtttttctaaatcaatttgtttctttttaaactcacgttgttcttcaatatctacttgtgatatttccacaaaacctgcatgctcttcagcttgacccacaccaaatactctttttattgcaggaggcataccatgaaagtgtagttcattgtcattgttattgtctacagattggtctcgttgaaaacttccttcaaattttttcatatgttctggtagatttgattgtatgttgttgtttgtaatatttttgttaagttgcgatatgtatatcaattcagaagaattaggcccacaacgtgtaattaaatttcctattgttacattcattaattcgtcaaaagtatctctgaatacacgggcaaattttgatctctcagtcatggaatataaacatacagagcatgctcttaagtcgtccatgctagaaaataggctagcacttactagtggacgtgtatgtgttgattcatcccctagctcttttcttcttttatcatcataatttctggatagccacatacagtaaaccagtgtgacacctgcttcaaacaccgtatggatagctggtgtagaatggccaccaatagttctttggtggaaaatcttatataattgacatatctggcctgcagcagcctgacactctctaaataatctatcttctggtctgagaaattctaagtatggttgtattaataaccttacagatctataataatatagtttaagtgtttcattttcgaaatttttaacacctgtagtagaacatgtggatctccacagctctaattgtttgaaatattcatttactttcgggagttggtattttctcagttctgttgattctttactatcatcagaaaaaatttgtaattcttctataaaacaagattcaagtctccttaatctcaatgattgattaataaaatagatattttttacttgttttagtttgttttgattatctctgtcttcaccaaaatacggtaggtttatctctgattcacttatcgtgaagggtttactgacagcttcacatatcattctttctaatagataaacacaccaaaagagtcttaattttttggatgcaaatggctcatcaggaacccagtgttttattaaaagatttgtcttacaaatatccattatatctttcattatgtcatacaaaaccaatgaatctctgtctgttcttatgagatataacactaagagagttaacaattcaattttatgaatatcgttgaaatgtccaccacatttggtaatatgtcttacagcggtaccaaaatatctaattggtttatgacctttatatttaccagttgtcttttgcatacatgcagcaatgctaaagatcaaccacattctgccacactcaaaatggaattcggtattggaatatgaatatatattgtttttagcgtaattatcatgaaaggaataaatctcttcttcatcaagcaaaggatatttaaattgtagtctagtgaaaaatgtgtctaaaaaagttcttgataaatccatattgaattcaaatgcagggtaatacaggaaatcaatcttggcgaaatatttggcaaagatgcaattattgaaatcaatagagtccacagaatcagatgataatgcaggtatggaaccatttgcattattgacccctgaagagggtataaatttatttgaaggagatcgattgttatcattattgatatttttattgtttaccacaggcaaatgtgctactgtggattccaaatcctcgatttcacctaacagatgggtgatttttttataatgattcaattttttagtgaaaaccgcgccacctatgggtaaatctataagtttttccaaatatcgtagttttctttccaggaatacggtatattggtccctatcagagttttcgtatcttttgttaacttttcccttcgattttctctgtggttttcctgttttctgttgtccaattgttaaattgttgtcatgatttgataaagaggactcaaagggcgtgattgtatgagaaacagaattagttgccgatccctctgtagtagtgctatacggtgaatctgtaacaatgggtgaggtaatcaaggaggctggtggagttaaatatttcgaggaaggtgtacttttttgtgtatttgctactctttgacttattaatggaatgatggagtttgagttctttaaatctgtctgttcttccacaccttcgacttctggcatttggacatcatgtgagggtttgatagtttttttaatggttggttgatgataacctgcaggttggatacatttaacggcagctcttagacatgctgtacaactgggtagtttttggtcgcatttctgttttcttcttttacataacaaacatgatttcgatctccctcttttatccttcaatagaatatcacttctattgccggccaattgtagttctttttggaatctttctatgttctgcttactaatttctttctttggtcttcccattgcgtgaaaaaaaaaaagaaaaaagaagaagaaaaagaagaatagaaagataaatgagttatagaaaaatcgaaaagagagtggaagatagggtaataagctatagcagtaaaaaaaaaagacttattatatatagaaaaagaaaaatattgaatgtgtcgattgggttctcttagttgcttggtttctgattaatatattgagtaaagaaaataacaaatgaagttgctttgaacaagaacaaagagagaatgctaattggtaagaaaataaagtctctgaaattctaacttcaatttttagtatttctatatatatatatatatattatgatgtttaattatcttttgattgtagttgataatggatgatacttatgcagataatcttactggtcaatatgacacatattgcatctttattctcagacaaaaaaagacatcagattaaactattgtaataagagaataatagagaggaaataagaaaaaaaaccacggtatgttaaaagaatagagaggggggcaaggggaaacggaagaagaaaagaaaaacaatgtgtatctgcgtgtataaagacgtctaatatatatataagtaagcaagtttgacagcgttattaaaaacatcaaaaacgattgtcgaggacggagattacatcaaatgaaattccatcaaaaaaaaaaagaaaagaaaagaaaagtagagtcaacttttgttaaattcgtgtgatcgaaggcaaatcagacaagttttttctgagattcttaaaaacaggcaatacttctattgttttgtacgccaaaaaaagacaattattcattatgtaagaaatcgcaagtttaaaaaaaaagataaaaaaaaaaagaaaacaaaggaaaaaaaagatgtctggtgtcaatttgataaaggcaagatagaaaaaatggtggcgtattgaaaagatttatggttaaaaaaaaaaattacgtatattagtattactcactgatacggaaaaaaagtagacaggaatataatattttgtgtttttctaattaccacacctatttgaagtgagggttttttacatggaaagtattttagaattttataattcaaatagaatagaacatattaggataactcaaaaatatctatgcgttttttatatgcttattttttttctatggtaaattcattcagaatatctgttttaaaactagcaactttcttgtattttgtttcctattgactaaactaaatactgttagagttctgctaggaagataaattccacacacgccactttacagtagggttctcatagatttttgaaaagtttttttatttttttttttcaaaagacaacgctgttgatggtgatgtgattttatcaaaccctaacttcatctgagctcattcctcgaattttcgctgtcactaaaaatgaaaatgttcctcttttcttttcttttttttttctgtgtcacctatttgggaaagatgtcatggagaacgtgggatttaaaaaaatatcagagaattaaacaatagaacaaaacaattttttggcatgagggagtgtgtaattggcatatatggctactaaaatggacccccaatacctattttggaaaagacacttaacaagatacgagtaggggggagcagtggattgggaaaacttcataatactaaataatgtcatggaggagggtggagaagggcgaagacagagagtaaggaggtgatcatttagatgtctctccttctacaattcttgaggagttatcatacatcaacatgcaaaaaaaaatagtaagcttggtttttgtcagtagttatattgttttgtaaacgatagtattaaatcttttttttttcttctggctaatggtttaagtacttgcagaaaattcattattatatatatatacatatattataggaagatgtacggaatattattacaaaagaatttggttacttctctacaacacacacacacacacatatacatataagaaaaaagaaaaaaagatgcagttaaatagtgagtattagaaagaaaagaaagaagagaggtaacagtatatttacacaggttaggtaatggcaaatggagggtctcaataattataaatgtcaattattttaatcgtttaacatagataaaataatgtcttgctcttctagttgctgctgtcttattttctcctcatttgcctttttatgttctaaatgtctctgtcgactcttcttatcttttgaacgcttattttgtatagctaattttttaatagcttcttctctctcggtaagtccacctccattcctgtgtctttcaatctctagagccatcttttccctagctataactcggttttggactcttgatctagtggattgacaactcacaactattccagtagggatatgtttcaattgaactttagagttacacttatttatcttttgtccaccaggccctctccctccatgtagaaaactttcttcacattcgctttccatctctttagtaaattttggccttggaggtaatttgtatctcttgataaataatggaattaaagtagtgaaatttcgtttcattctttatctttattggttcttgttcttttcctttaacccttttgtcttgtgttccttttcaaatatctattggttgaggttgtctctttacaaagtgcttttgtaattagcgacgttctatattaatgttttaaaaaggcatttctttttgttttttgtttttttttttgtgtgttttattttcctttttcttcttcttatttgcaatttctcgatttcactcttttgctaacctttgaaatatctaattaaaaaaattggtcctaacttcggtatccatttcttataccctttaatccttaaacacatggtatgatattataaaccaaatatacagatgtatcttcatataggaacttgctaataacactttaaaaagagagagaaaaaaagataggataagtaaaattttgacatgcatgtatgatgtttacaagttgtgtgaaagccaacatattggatagttctaaaagatatgtcggatataaatctccattgctttcagcacgaagagggattcaattaactaaggcttgtaattattataagagtcctgcgctattgatgtctcattccatctctctccctacacatggtagtgtccctaattccaaatcaactattaagaatgggaacatccccattaataatagctatttcaatcaatcagataaaagtgatagaaagattgatgacgggttagaaggaaatgatttaataaagacattatctgaacagttgatactagagaccacgatgaatttgcataaacctacccgtgcagagaatcaggtagatacgttgtctatatatcgggatctattgacctgttttactcctaggcagagtaaagctattatgtctacaattttgtattttttaaatgaacaattttacatgcattataatgataaatttctaagagatttcgagattgataagcaggaccatttatttaactcattgaaaagtgaaattcaatatatcatcactaacaatcgtgacactgaattgaataaacatcatttattgttgacaaggctgaaaagagatttggattccattgtggatgaaatcaatgaattgattattgatcaatacgaaaaaaactgtaaattggatttccatgaacacaaaaatgaaaataccttgttgtataagaggatcaatctaaatttgaacgattgttctaataaaatcactattcagattacatcaggcattaagtcagagattgagacacttagatggcagacgacaagaagcgggttgcttgccgtagtcatcatggcgtcatcgtttatgatcgttgtgaacatttctaataaaaaatctagaaattctacaacagatattttaatagaaaataattctaataagaatgaagatgaagtaaatgataatgagattatagatattgaggttatataagtgttaataggaggaagaaaggagaggaagagaagagagaagagatagaagagatagaagtatacagaataattaaaaaatgattataatttgcttttatcaattttatttcttttagcggaaattttcttatcacgcaataaggcaaatcttctctgaggttcaccattacgccaaaatggtaaagcaccatgaacttcgtttgaattggctaacattaaggtgttgacagtatcattgcttgctcttagaactgttttcatttgtaagcatgcgggtagatacagaggtttgattttttcttttaagtctctaataatttggttgttaaaagtgtcgacatttaagggatccatccccatagaataatctttgacaatgactgtatttaaaagttcatggaaatataatttctcaccaaagaccaatttactaaaacttttattccaaccgatttttgttggtagagttattgaagtggcaccttcacaagataagcctaatttagcaaaaggaaactgtaggaaattagtctctgatttagtgtccatagcatagaccatatcacaaagaagaacgatagcagcacttaaacctatagcagaaccgttgagacatgcgataaggattttagaatgattgataaaagcactagtgatatattgatttttggataaaaactgttcaagccataacctcaattcataagagtcatcaccacttggattatttgatatggtgttaaaatctgcaccagatgagaagaacgtacctgaaccttgtaaaacagtgaaatatatcttattatcgttttctgctatttctaacagtcttgttatataaagaaagtcatcatatgacatggagtttaacgtttgtggattatttaattttatgatgaaaaatggataatttatggaaaaggaaatcttagattttggtttaattgcaggcataatgatatatatatgtatatttgtatatgttttaatagtaattgtttttttaatctaatttgagattacgactttgtgtaactttcttattgaagcttagaaggttagagaaaaatgttataatgtcaaaggaaaagaggagatatgtagtcaatagcttataatatacaagaaaatattcaaatattcaaacaaaagaacgaataaataaaggaggaagaatatattctaaaataaagtttgtataaatataaatgtatgatatagatttatagtacttgtttggttgtctcttttgttgtcaaatatatatatatatataataaaagaatataaggtaatgttcttgtttactccctacaacaaattaagggttactgtcttacaatgttaaccaaaaaaccaagaaaacaacatccatacataaatataaatatactaatttatatacatatgtagacataaatataatatatacaaacttattgatgttcttatatttttttgtgcttgtaatgactattagaaaaatacaggggagaaaaaagcaacagggaattagtattactaactccgacgaagtggcacagactaaaaatctttgactttggcatgtaataagaacaatagcagctattctgtactgtactgtactatgtagtcacccatggatatttgagaagtagagcttaggagaggcttgagtctgtgtaatatgagttggtgtgtgcatgtatgtgtgttatttcacttcagacgttttatttcttcagtagttgtcgagcgttatgtgtgacctatcatgataccatcataactctttagagattttaaagtgaccttgagtttcagataatagtgtttggaatttgataagaaactacatagacttttgtaatagcatatccagcaatttgatattgattcgattgccatgtcatctcagatcacctttggtgtcttgttgttgtagagtgctacacctttcattcaatagcgtgagggtgtctggattgttctgctggtcacttcctcaaattttttgttcctttaatttcccctaacctcaattttttaagatgagatgagatgagatgaatcaatgctaaaacaaggaagaaaaaaaaaagtaagaaagcgtatacaggataaaggaagacagagatctagtccttgagctttttgcatgtacgtggtagtttcagtaaacattaataagttagactaagtttgtatatatatgtccaaagtcgatacattattggatttaatacaggtagtaatatcatagtgttggtttaatatgtcagacgtagaatcattgacttgtggtgatttatttgaagaaccagagaatttccgcccgcctccacctgaaccacattttgccaactatgagcgttcctacatatcgctaaaatcaaaatctaagcagaaatcaatcgaattaagattggtcggttcctctccattatggggtcatttgctttggaatgcagggatctatactgctaaacatctggatcttcatccagagttggtccttgataaaaatgttcttgaattaggtgcagctggtgctttgccctccgtgattgctgggctcatcggtgcaagacgtgtggtggctactgattatccagatgttgatttaatcgataacataaaacataacgttcgtgcgttagagaatgtctccgtggaaggttacatatgggggaatcaatatgctgatataataaagcatttgactggcaataatgatgaaaaaaaattccaattgattattttaagtgatctagtattcaatcataccgaacatgataaactattgaagactacaaaggatttattgtctaaggatggtaaagctctggtcgtattctccccacatagaccacacctattggatgcagatttggatttcttcaagaaagctcaagaagattatgatttcaaggtggagaagattgaaatggttaattggaaaccaatgtttgaaggtgatgctggtcctgctgaggttagatctcgtatttatgcatattatttaagcttacagtaaaaataatgtatttgtgtatgtatatatgtatgtatgcgttatccaaataatagagaacagatgatatcaaatcatatgtaacttctctttgttttttcttctttctttttcatctatatacactaataatacagtaaattactactatcaataaatactattactaaaaatttaacattagaactcaacacaaaccagcctactttggctttctgtagttttgtttctttagttgattattgattgcagaagaatttaaaaaaaaggaaaacaaaaacaaaaatattagggagaagtaaaaatgagaattaagtgagaggaaactatagaatgtacatataattttgtgaaataatattggttaagttggttcagttttatcattgatattagtcctaattgtaaaattactaatgaggaatgaaggtgaaatggggttatatgaaattttgttttaaattagtaaatccacattgtgtgaagacttgaccatcttgatcgtatgcataacatgtagtgccacttgcacattccattgtgatccatgacccaaagttgcatatgccaaaacttccatcactagagcatgctaattcaccgtctgtgcatgtagattcaccattatatttgccttctgaatataatttgtttagttgttgagcctgttcatgagctgtattagatgatgtaggtgtaccagaagtggaaattgtagtacttgcggtagtagtggtgctaacacttgtagacagtgaagcagaaactggggatagagtcgaagtgatacgttgaaaggaggatgtttcagtagagatggaatcatcggtgatggttgtagcaataatagtaggagtagtaggtattaacgtagatgttgtttcaccaaaggtaccaataaatgggataatggaggatggaattgtagtagtaccgacattaggtgaaacatcgttgggttggaaactagcaatactcactggtagaggagtagaaattgaggtagtactagagccattagaaacggtcaaggtgaatgatagttgttctgttgatgttggagcaacaataatgtgagagattatactactaatactgttatcagtgctgataattgtagaagctgtagaagtagtggacatcgtgacggtagaactgagagtagagacaggaacagaaattggtaataaagtagttgtcttcctattagacaatgaggaagaagaaataccatatttagaagtcgtcgtcgttttggatgcagttgtggcgactggtgccaatgtagaagtactcctgatgttggagaaagacaacattatagaagtagaagagggcattactagagataaagtaaatgctacttcgcctgaagaggaggttgaaatagaagatatggcaaaggaagaggtagaagaaaaggcaggggaagaggtagtagaggaagaagtaaagctagaagaagatgcaagggatgaggtagtagaggaagaagtaaagttagaagaagatgcgaggaatgaggtagtagaagaagaggcggtagaagaggcggaggatgatgaacctgaactggaagaagaagagatggagctggaaattttatcatttaaaagagcttcaatattttcaatataatttttcccatcaatctcataagtaaatgcttgcgatgcgtcccaaatcgatataccaccgaaattggcagatcctttaattgaatcaatagtctctttcaataaattcaaagaagatatgaagcctgaacttgcagcagttggagaaccaggtaagcctaagaacaacttaatattaggatttggcgacatagtagtggcataattttcccattcattccaattgaattgtttatctacattacaatagttgttatagaattggataaaggcaaaatcgacttcagagtttgttaataattcgcctactgaagcgtcaggataaggacattgtggggcagcagaaatataatatggtttggaaccttctttgaaaagttctcttaatttgttgactaaagcagaataacctattgggttattattttcaatatcaaaatcaaaaccatcaatcaatgctgaatcgaacggacggtccacagaagctgaatcagatccctcaccaaacgtattccataaagtttgagcaaaagattcggcttcttcatctgtagtgaagccataagaaccagaagaaccacctaatgaaaggaggattttcctacctaaagattgacatgtttcaatatcagaagcaatttcagcacaatgtaataggttcggattattactgaaagtgtcagaacaggcattagcaaaatttaattccattggatctgggaaaacatttaaaaatgaaagaatgaaaatatttgcatcggaagattggcaatattcagataacctttgttgattaccttcagagttttggccccaatatacagcaatattgtttcgactgtcaatatcaaatgaaagtacgtactgtattagaagtattaaaaaggaaataaatgtgttaaatgaaagcattattttatgtgtgtgtaagttggttggtaggttattttaaagaagaatatgaaaggtagcgaattggtctatataatcaaaggaatgatatttgaatattgagtaaagatcaaaaggaaaggaatataacgaatgtatttagtttgttagttttttatttttaacttgagcgaatgaagatgaacaaagttttgcctatttatactttgattattagaaatacatgttaatagaaagatttaaagagaataatggtttacgaaagacataattctgtagatcatttttcatagaagtatcttgcaccattatatatatgtaagtattcgattacaacatgtcgaatctttatgttttatcaccatatcttatttaatgtaaataaactgtaaccagcatgataaatggctgagattatttatttttagatgagaaatcataatggattagtgtgtgtgtgcgtgcctgtgcaatatcatttttgattatatttacacaattgaggatatgtcattttgactgaatattacaacaaagggttaatccctgagtttccattataattacattgaatattcttgactattacaatatttcttatttacattataggttgttttgtaaacaaacacagtcacacgtaaaaaaatagaggaaggggaaaaagtttgttaatgtccatggatggataatatttggtggaactgttgaacacaaggtaaataaaatgaaacttggaatagcatttgttttttttttctttactatgtttacaagtaaataatgtaattatcaagcttggctttttctgtaaaataagtttgtttataatatgctgggcaaattcatatttgtctttgcgcagctttatggtgtggtgtatgggttgttgtataatattgcattctgggtgtgtgggtgcacactgttactcatggttgcgtctcgttcaaaatgattttcttgttttgttttcttttcttttattccaagttcaaggttggggttgaagttgagattgaaccagagagttagtaatctaacggaagagaatcttaagttgttcagatattttagaagatgactatgtctgagcaatcaaaagagtattgagttgctacatagtctattattagcattcactctttatcttttttttttcctcatttcccactttgtttaatatttcttgatttccccttactaagcaaaattatgctattatctcgtttaaatacgtgattttccttacttttttgtttttttttattgttggtatcacaataataataatagtaacaatagtactaacagtaataataatagtattgttttttcttcgattatcaattgtcagtaactaattattcagttatcattactaagtactgtttttgttattgtttttttttttttttgatttcttctgaagagtttttgctgttcgagaagtttagttgtacttgtaatatcaactggaagcatatatataaaattatacaacatacagatcccttctcttcttcttctttccttgatttcttttttcttgtttattggtacttttctttagtgtttatttaaaattaaatgtaatcaatgaagtcaattgaattattaaaaatatataactagtattaaaatggcaagaacctcatttaatgaaattatcagtaaagatcatcctatctataaacctgaaaagaatagatattggatttatggggcatttggttgtcccttttctcatagagtaatgatagctagatctatcaagggtctgaattcagtcattggattgactatagcgcattggttaatgggtcccaatggttggagatttattcaatcagataaaccattaaaggaacaaccatttagatatgatggaggggtcacttctacagagaatgacaattcaacaacttttgtcggtgttgatgagaatttagagaggttatttgttgatggaactaatgatcctcattataatacgagaagtattaaagagttatataggaaaagtgatcctgaatatgccggtgtcttctctgttcctatactatgggacttaaagactcaaactattgttaataatgatagtggtcaaatagttagattattgaatagtgatgtttttgatgaatttgtggactcactaaattctgctaatccagaaaataaaaaagttgatttagcacctgtagatttgattcctcaattggatgaatataataaatggttacaagttaacattaatagtggtgtctataaagttaataacgctgttactcaggaagaatatgagaatcaatctaaaaatttatataatagtcttgatgaaattgaaaaaaagttgtctaaagtttactccgatttggaatccagatttggtaaagaagataaaaataaaatattatccaacttctatcttttcaataatcaaattacagattccgatattagattatttaccacaattatcagatttgaccctgcatattattcacatttcaactgcaatttcagaaacattagaaacgattatccctttatacatctttggttaagaaacatgtattggaatcatgctgcttttaaattaacaactaattttgaccatataaaattgttttatgctaaatcttttaagaagactaaacctacaggtcttgtaactttaggaccagaattcgatattttacctttaaattaattgattaggaaggtatgctgttttaatgtatgtgtttttttctttttcactccagtatctatatctatatatgtctgtgtttatatatgtatgtagagtatatgtgtaggaattgaataatgaattggtttgttacgattatatctaagatgatatccatatcggtggttaatatatgaataattagcgttttttttttttttgtttattgaaaattgtataaatctatagatatttttagaaaaagttaaattttttccaatcattgtgtcaaatagaaagaaaataaaaaaaaaaaatttgacttgcaataataatttcgattgttcaatgttggtggtcattaaacctttttcagacacacgtattattaattggtactcttggcactcgaaacataactaataataaatcaatgtaactataggagtcaacttattaaatagtttcattaacatacaaatacatatttatgaagttgaattttcaaagaattttgtctcccagacgctgacaaactcattcttatcacttggcttcttttttatattttttataatagatagcattttccttacgttactatttatctcctcaacttcttcatgaatatcctctttagtaaatgtttcatctgccatatatattgtacaagtgagattatccacagctgcagcaatagatttatgtaactcattcaaatcatctaacatctcaatagtgtaaatcttaggcggatccttagacataataacatttctaaaagaattaaatagagttctaattaaaataactttatgtttccattccttcataataggtaatataatgtcaataagatcctctgtgatcttttcagaacttttctcttcctcctctactactacaacatcctcctcctcagcactatctaaattgtcatcaaggaactctagtttttgtccaatgtttccctctggatcttcaaggaattcatccacttcttccattacatcacggatcaattgcgaacttgtcttaaatgaccctgcaaggacaccaaggtcttgcaatttacttatttcatcccaactatcacaacacgaccaaatcatcccaatgcaaattaatctttcttcgtcatattctctgttatcaaatttagattccaattcttgacatagcaatttcaatgaagttaaatatcttaaaacagattcgtctaatttttgcaataataatttagtatatcttttaccgttataaaataaaggtaagagactaaaaagataaaatgttgtgtcaataagtgacttcaattctttataagttgcttcataatttgtttctttaaatgtaaccggttttaaaatgatacctaatttggtagaatgtgacctaactaatttagacaatttagacaattcaatcaatggtgttgattcctgtaatttggttttagattcaatggaatggattgcttctaagttatcattatatctagccaaaaactcaatttcaatggctgattttaactcaattaaatggtttaaactaatttttgaaccattactcatattgagagattttctttacctttcctaactcttaattaattaattgatagatatgatatatatttgttgtatgaaaagatatttaacccttctttgatgattgtaatattacaaagtttgatgaatttagtaggaaaaaattttttaaccctttcactacattaaaaacatcttaaaagaaatataaattcaagtccaaaagaagttactcgtaattctgaataaaactcatcaaatcaaaaaaacaaacaaacaaacatttttctagaatataacggctttatattaagtaaacaatgttattacacacatattatataataaagttgagataaaagtttgtatatatgacaattatttaatcaacttaggaaacgtttggagatgggttcatctttctcttaccgttggttaaggtaacgttgacgaatcttctggtgtataataatctcttgtaagctctaccctttggcttctttggcttttcagtcttttcaacctttggggtttgggatttaactttaccagcacgagctagagaaccgtgaactttagcctatatcaatatgataaaagataaaaacaaacaaagcaatttataacaaattttttttaatttgcaaataaacatgttttaatcaattttttgttagtataataaattctttctttactcataatcaaacagaaatacgcagcattcattacaaatgtattaatacttcctgatactttcaatacatgcgcatttatcctatcacaaatatttttacttgttgttatcaatgactctaattttctttcctcattctccttgttttaacattcaatacttttaatataacgtaggaagacacagtctcatttaaactcgacactttttataaaatcacatctctcctcatattgtaaaccatatacagacttgtaatcctgtttattattcttcttttttttcatgttactttcactttaactctcctcaatgttgcagttttaatttctgttcattattgcataaataaactgattctatgtacgtaccattttgtattactagtttattggttttctgaggtctgtaccttatatgtgttgccaagtgttgggtagcacgcaatatatccaacatatagcgtttgaatatatcgaaattaagagatttcctttgtttcttggagtgtatagtgcagtaatccaaaagctaactagactgcaacattggaaggtaccaacaaagaccaaggttctagtggcgttccggccctccgctaggcagacattcaagagagcagctgccctcaattagacaggggatgatgtagctaaagggaaaaaaaagaaaagggtaggataaagtgaaggatgcaaaggtagaaggaataggaagaggaccgaagaaaagaagactctggttgttaaggagagggagacaggcattgcagaaggagatagggagttttactaaaaatcatccttaccaattcaccttagtaagaccgttttgaagacattttttctaccattcattactgcatttacccaatcaggaaattattcttttttgtgaaaaatcagtctctccacaaaatctccaaaaaaaattctaaaaaaggaaagttgaaaaatacgaataaatgaaaaagttgtaaatattattgatactttttttacagtaaaggtatgggtcttataacggtcctttctttcttacattgaaattaggcatgagacttcccctaatatacttatcgtattattattattagtattgtaataatcattaggattccaaagatttactttcgaaagcgaataaattctgaaatattaaaacaattaaaactgctattttgtatatctttggtcatataacagtcacgatacttgcaatgatttgctcttcaacatgtaatagataatctgacctttttctttcaaacttgaactatcactaatttgagagttttcatcgtcctgatcttcttcacttaatccaggctctctctctaacgagcaatgaagtatacaacattgatcatgtgcaattgctaatagaacttgatcaaaactagtatacaattttgtacaaactttccagtctcttggtttcagtttgacactgtattgtattttattatcttcttctgcttgttctactaatcttgatatttcctgcaatggattttctccagaagaggtatgtgcgcctgagacatgtttatccaacattgttccattacctaccatctcactgtcttctagtgcatcctcttcatattcatcatgatacatatatcttctatcattcttttcaaatggtgctgttattgtttgattaccctttggagctacatgaagagtaccagtgctatcactaccactgttagtagccttattgttattattattattgttactattcttagacatggcaccatgattagtatcactttctgttaagttattcagttggttttcctctttcatcggatcatacgaaacatctaatggtccgttccattgaattgatatgtcccattcaacttgatttacagataaaaataattgtggatcatctccatttcgatatgtaattgcgtttagttgaatatctttgacattgctatatctaccaattcttttcaggaaactctggaagggcctaccaaattcaccataactggaaggtaatttcaatactaatggagaaacatgaataaccggttcctttaaagatacatcttgttcccacaataatcttttcaccgggatcataaatttatgtatgacagtcttatttatgagattgacatcatcattcacaactttttcacttttattctttaaaccaatggttttcgatcttatggtttcttggaatctcattgtaaaactatatattggggaaatatttcttcttttcacactaatctcattttcttgattctctgaattaacgttatggttatccgtgcctctattatatatttctttccattctcgaatctcttgcaatctaatatctattgcagttatggaaccttgagataatgctttatcatactgcttcaatacactcaatattctattgcagtttacttccagagatacaggccggtcttttaatgaacttacgaaatagcatttaaacacatcattgggtatagtacaccaaagctgtccattattgatattcacattatttgatgaaattcctgcaagtttaggagtggagataataactaatctatttttagtaaaccttaaaactgcctgttctcgaacagaagcgacggtagataaagttgtctgcaataatttataatcttcaggctgctcaaatccatttaagacaagttttattttcattaatataacacgtcttacttttgaacgtcactattggggatgcttttgtcaatagcagaactctatatttttggtagaaactactgtctaattttatttattaatttgtcaagttcttagtggatctctaaaagaaaaaaaaaagatatctaagataccaaagaaagttgaatgtctaaaaattctggggatgttatgataactttaatcttagagttcaaaataactcgagggaggaattaaaaaagttactgagcaagagagaacagtgtacactagatatatgtagtgaagaaaaaataacttttctctcaaaacttactgtagattaggaaaggacttttctacttcctattttataaaagtaaaaaaaacaatactgagattatttttactatatattcgagagcatgtctatatggagatgataaaactatcctatgtatttcgtagattaattcacactaacattcaacaaagattggataaaatccctttaagtgactacagaatattttccattgcagctcatatagatcatggtaaatcaacattaagtgaccgactattagaaatcaccaatgtgatagctaaggataacaataataaacaggtattggataagttggaagtagaaaaagaaagaggcattactatcaaagctcaaacttgtactatgttttacaatcaagggaagaaagattctaagagccaagactatcttttacaattgatcgatactccaggacacgtagattttaaagatgaagtggttagatcatttgcatcggtagatggagttattttgttggtagatgcaataaagggggtacaagcacagactgtagctaactttaaattagctcaaaatatgaatttaactatagttcctgttattaataaaattgatattaagaattctcaagttgatatagtagaacaacaattaatccatgaattaggatttgctcaagatacaattgttaagattagtgccaaatcggggttaaatgttaaagaacatctattaccgaagattattgacacaattccacccccaaaaggagagttgttagacccttttagagcattactgattgattcatggtatgatccatatttaggtgtggtgctattaactaaactagtagatggtaaaataaaagttggtgataaaataatgagtggtattacaaagaaaagctatgacgttaaagaacttggtattatgtatccaaaccaaaccccgcttaatcatttgatctgcggacaagttggatatattattacaggaatgaaaaatgtccaagacgctatcctaggggatacgttagtatcacagagccatgctaaggatacagtattattacctgctttcaaagaatcaaaaccaatggtatttgtgggtgcatttccagcagacggatctgattttaaggcaatggatgaaaacatcaacaagctggttctaaatgatagatcggtttcattaaatagagaaacttctgccgctttaggaaaaggatggagacttggattcttaggttcattacatgcgtctgtatttaaagaaagactagagaaggagtatggctcaaaattaatcattactcaaccaacagtgccgtatttagttcagtacagtagtgataagtcaaagttgattacaaatccatcagagtttccggataattcttcaaaacatagaacaggcattaaatctttacaagagccttttgttaaagcaacaataacagttccaaataagtatgtcggatctattatccagctatgtgaaaataatagaggacaacaattagatattaaatatgctactgggatcgatttggctgaattaatttatgatttaccattggcgcaattaattgatgacttctttggacagttaaaatccatttctaacgggtttgctacattagattatgaatcaaacggctttaaagaatctgatattgtgaaattagaattattggttaatggtcaaagtcttgatgctctatcacatgtagtacatagatgtcaagtccaacatctcggtagaggatgggttaaaaaatttaaagaatatatcagattacaacaatatgaagtggtgattcaaagtagatgtaatgggaagattattgccagagaaacaatcaaggctagaagaaaggatgtcctagctaaattacatgcctctgatgtatcaagaagaaagaaattgttggccaaacaaaaagaaggtaaaaaaaacttgaaatcaatagggaatgttatgatttctcaagaagcatatcaagctttcttacgtaaataatattcaaaattatttgtataaagttaagatagaacttccatgtatatatgtaaataataatactccaaaaaaaattaaaaaagaagaaagaatggaattaatgcattattttacagaccgataccattacaaatattttcatctctgatatgtataggtctttacaactttaaatatcttgatggactaatacagtcatgtatgtttttgtgtaatttagtgtatcttgctagttatttggatttatgacaacatcgtgcagaaagaaactagaagaaaagaatatgtgttaatacatcatataagccttaagaatatctatacaatggtaataaaaagtattatttgagtcttttatgagaaattacacaaaataagaattattcagattagaaaaggtcatctatctgaaggagagtttaattgcattaaagaggggataaaaatttgactagcaatgaatatataacaaactaggatatttaatctcactattattttgttttattattttatactctttcaaatatcttttctatattttttgcctttcactatcattccaagatatcatccaaagtaataacacctgtaaattttggattttcaatctttgatacaatgcttctggctacttgttgtgtagatacaggaggttttataaatcgattaatcatatcatattttttttggaaaaaaaaattgattgctataattcaatacacttaagatatcagaaattccatctctaatactacatgaattctttacattttcatcaaacatgattcctggtcttacaaaaatagatctaaacaatttaggtttaatatgactcaactgccattctgcttcacgttttgatttgatgtaaccacttgggatcaatggacaccaatcatctgcagatatatatgttaaggtaggcaaacacggctgatcttttacaacatctgaacttttatcttgcagcacttcttgaaaagtttttcctaatatcactgcgctttcagtgttcattcttttataagtaaagtctgatgtattacctgaacctttagaaacctcattaacaatcgatttatatgatgaattttctaagaggatgccgatagtatctacaacatccgtggcctcacttaagcggtgcttataagtggtaggatcgaatatatcagctgtctcccatttaacctctttcatccaattatatggatattcttctttattataattaattggaagaggtggtttgcctgaacgagacaatgcggtgacagattgaaagattcctgattgtagagctatctgacatattcttttacccaaaaaaccattccccccaaatacgaccagttttctgtttagtgaagaattcatattcaaactaatagtaattttctttctattatacttattagtttggatatctcagtatattatatagttatagagcgattactttgaacatactttttgtgtttcttttcggtcgttaatattctatatatgcaattttgaataacatcttgagtatttttctgtgtattactttttttcttctaattaacacgtaaatacaatgaaatgagtatgtcaagaaatttgtgatctatgctgaaattatacattaatgttatattttctatatatcatgatagtatcaatacagtggtaaaaacaattatatacattaaaaatatatagccctaaagattatcaatgctttgtcactttcaaaagaaacttagaaacaatgcttaaagaaaagatggtcttggcaacatcaaaaacatgaaaaggcagaataatgaaaaggatcaatctccttataccttaacagattcagttaaaagagatttattatctagattaacatcgatttgtttatagttatcccaagcaattctatatatgaaactgggtgcaaacccaccaatgtttgtaatataaatatcaatattctctggaggaacatacgcagttgttttgttaatggcatctaatctataggcaggattcatcttaggtagaacttcatgggatccaccaaattcaacagacttctctatattaaatggatacaacggagatagtttataaagaccagcaactgcaaaaacaggtgtcctaaattcacgagcacattcacatacagaggatacacccgagctagatgcaattgatccaccattaacaaagactgctttagtaccgatgataactttcccaacccgagacattaatgcaaatacagcagaatctgggataatgattgtttcaatatcatgttgtgctaatttcttggcaaattcatgtgcattgttagtattgttggggaacccctcagtgactaatactgtaaaagttctattggctttttcacgagctcttattaaaaatttcaatactgttttagattcaggagtaggagttagtaataattcatggtcgtgaatcaaatcaatggcaatctgttgaataccatcatctatgttggtaagctcatcaattaaatctttaataccttgaattgcaatttgtctgtaatctgttttagtctttttattacgtgatgataagatctttgtagttggcttaatctcttctggtttttgtaaaaggttaaacatggatgaaatcaaaggttctgaagtggaactattattgttgttattatcattcaaaccgtttttgtttgctagttcttgagcttcctcttccatttcatctcttaatattgtaagcaatcttctaatgatgttaccacatgaaaatgcggttggttgagctttttctaattgcaaacctaattctctaagttgagctattaattcattgacatgtgaccaacgtgctgcagacacgaatcttttcaataattgtaatgtttctaatgcgatgtgatatgatccaacaatttgttttctttttaatttagcaataaacgtgtctagtatgatattaatgtcattgttccctgtagtattgttattgtgactatttaaagcattcaaattggagctacttaattgggacattttacaccgttgatattcctaatggctttgtaatataatacacataaatatgcgtatatgtgtttgtaatgtgcgtacgtataaggttatatttagggtgtggaattattcacgataataagtagtaaactcagaaatgctatcataagtttgtttaagacaaggatggccttcctattgagataagaattttccactttgttggagttttctttttttttttttttttttggttttttttctcgtttgaactgttctcgatgtctatttattgaggcccatctgcatttcgataagagatgacacattcatagacgtagtacagatatcacatatatatatctatatgacgacgattgtaattagtaatcatgacaatcagatacatctaatagtggtagtattgtgcaaatagaatataatcattaccttctgttaggatgtctcaatctagatgatctgtatgtttaatttctttacttctttacttactttcttgcttgtttatataatctagataagtatatttaagtatgattttagatatcaccattatattctgccaatagtctattacactgtaaattaagagctttcaattttgtttcatttggtgaaaaacttaagcctctttcacaaactactacagcttctttatattgacccaattttaatagagaatcagttaatctaataaaaacatcagacgtggtcaaccctattcccaataataactctagatcttgtaatgcatcgattggcttattaagtatcaattcaagatcaatcttatgttttaacatgaattgtaattcttgtaattgcaaggcgaaggcttcgtatgagtttctgcttcttcttgacatttcgatcgctaatgaaacattctttagggcttcctttaatttttgctgtttcattttagctaacccgctatcaaatagatttttgattagttttgtagtattgtcatttggctttggagtaaaattgttgttggattcacctattaatgatttagtcaatgaattaatttgatcaacgttgatcgaaaatggttcatttgtttcttctgaatcagataaagatattaatttagaattttcgttatacaaaatagacattgggtaggctgaaagtattaactaattgtaatggtttcaatttattatattattatctaataaaagtggataaatataaaagttcttattaatattgatttgaaataataacttatgattttttgaagcaacaataaataatagtatatatatttatgttattactaataacaatgtttctgctatactttcttttctcttttgcttatttgttactgcttccttttgttatatttatcttttttattttatctaattgattttctttttatttatttatttattttattttttttttttcacttttgtcagcttattataataaacatgttattttaggtgttaaatatttgtttgctgagtgtttagatgctacgatgatatttcttgctagtagaagaagaacagaagatgatgataggattaagagtcgaaaccaagatggttcttgctgctgtcattgttgtacaaataaaattacactataatgaaatgtttatattggttgtacagcgaatggacaaaagtaagaatgtcgtagttatgaacttgtatgggtaaattaaaagtgtagaataaacatttgatattaaatacacatgtacttccatatatatatatatatatagagacatgtttatcctttaattatattatgttatactatatgtatatagatatatagttagatgttaacaaataaaaaaataaagaaagaaagagatgaaatgaaaaaaggagaaagaagatgaagaataaaagatattataattataacaacagtaataataattatcaaaattaccaatttgtttctatatttacttgttcatgattactattattatcattattatcattattattattatcaatattcttataaatcagcatcatcttcatctggtaatggtaaagcagtagcttgttccatttcttgttggtattgttgcattaattgttcatcaacttggacttctggtggagccaaagctggagaagcaacgaattctagttgtgggttaccagctaattttctagccaaccataagaatggtttttcgaagttgtaattggacttggcagagatatcgtagtattgtaggttcttctttctgtggaaagtaatggtcttagccttgacttttctttctttgacatcaactttattaccacaaaggacgattggaatgttttcacagacacgaactaaatctctgtgccagtttggaacattcttgtaagtgattctagaggtgacatcgaacattataatagcacattgggcgttaatgtagtaaccgtctcttaaaccaccgaatttttcttgaccagcagtatcccaacagtcaaatttgatttcaccaaagttagtatagaaggataatgggtggacttcaacaccgatagtggcaatatatttcttttcgaattcaccagtcaaatgtctcttgacgaaagtggtcttaccggtaccaccatcaccgacaaggactaacttgaaagttggaacttcaccttgagctggggctggagcagacattatatattcggtctatatagatgtgtatgtgcgttatcctttaaagtggtgtcaagaaaggaaaaactttcaatagaacaagaccacaaataatatatatagctaaggccagtaaaaatagtaaggagagttgataaggaatgcagactagagtaaaagaatcaaaatgaaaatataaaaaaaaaaaaggaaaaaaaagaaaaaagaaaaggaaaagagtgttattcactttagttttgactacaagtttagaatcgacagacagggataaagctggaaaatcaagtttataaaatttttctgtatttctgcagttttaaagtctttttggtaagcaaaaattttcaactcatcgctgcaatcaaagaaaataaaataacgaaaaaaaaaaaaaaaaagaaaagaagagaaaaaaacaagagaccaatttcagggtaactagtcacgtgcacaacttttctaaaaaaaattaaaaaaaataaaaaaaagaaaagaaaccaaaaaaaaacttttttttgtaatttgtttttttttattttttttttctgggtgcttcaaaatgaaaaaaaagagagagaaatctgtccttataattaatttatgagagacctcttatcactattttagggtttaattagtgtgatttgacctgttttcctatttcctgtttaggaaaagttattaagttctgaatcggttcgtaccttcatcgcttattaagaaaacattcattgacaattgcatacatatatacatatatacatatatacatgtatgtatacagatatatatatatatatatatatatatataaacaatatgggtttgtgtttgttttataatatctttcgaattaacgttaaaaatatagtatttctgaattgtttaatcctttgattgcaatcaagtagtttgctcaaagtcatccaaacatacatacatacatacatacatacatgtaatagcatcataagatatgtggatatattttgataataccaataacagtaatattagaaataataataataataataataataataataataataataataataataataataatggcacatttaatgtattagtagaatcacatggacagtgttatgaaaacattccaatgcttttagtcctttgggttatatattgtgcacttggtatacttattatcagttctttaactacaatatatctatccattacacataaaccggaactgaatcatgaaacagatctggagaaacaaaaggatacacttatagagaaatgatattgtcatgttaatagttttaaattttttttcctagtgacttttcccaatcccatacatgatagactaacctgaatcagtatagctaatacttaataattaataattaactcatcatcttttcttcatgaattagcataaattatgcatatacacacatacgtacatatatatatatatatataggcttaattaattatctaattataatggaagttaaaatttacgttttttatatttctcagtttcttctgatttaatataccttcgtttagaatctttaactgcactgtgtgataccataatatggctagtattattgttattattattgtagtagatttgatatttaggtatagtattggcccataaggatagaattaggggaggcggtaacatacctattttattggagacaatatcaccaccttcatacacttcatttctatctcttttagagagatcttggtttatgggtctattaagtatatttcccgtgtcattttgattagcacgctgtggtaatctcgattgtttaatagaatcaccgatgtcgaatctattactctttatgaaaatcttagaaaaccctggcgacccatcgtataacgtagatagtatatgatcttgtttataaatattgtttctttcatatctgtaatttttaaacaattcatgattcagttctttatcaaataattttttgattcttctattctttttcttctctctgtttgataatggatgtattataatttttttagatggcaaaccttcactatgtttattatttttattattcttactgttcttattttgtttactaatcgatgatgacgatggtttgccgtatttcgaacatacatgtttatttctatagtaatcagatgtaacctttaaatggttcttgccaataagatgtgattttctaacacttaatgtatcgtgagttaaatatgaatggcaatattcacagtaataacggaccatatccttttcttaacttgctctcttgttatctattctgcgttttgtgttgataagttgtttcccccctcccttattatacagtctttatatgactaatcggtgatttgacgttagttgtttgttgtcttttgtaggttacttctgttttggctttcttctacaataatgtttttctatattataaagaaaaaaacccaaaaagaaaaagaaaaagaaaaagaaaaagaaaaaaatagccatatgaaatacaaacatacacacacatacacacacacacacacatatatatatatatatgtatattattggatagtaggcctatatgcatgtatgtgtgtgatctatatatgctgtttagattaggttaatacttggacgttgtcaccctggaaatgcatcatcaaactgtatatagtatatagaaagtctgttttaagatttagtaaaacaaacaacataaatatgattcattaaatatctgggctgttctctgcgcaattatttttctaccttgtcttattcattcatttggaaaagaagagagaatataaagatatatatgtatatagatatgaacagtatgccaatgtatatctatgtttatagatatagatatatatatatgtatgtatgtatgtatgtatgcgtactaattagcggcatcaccttgtgtgataacagaggtttttctattgttgttactctttctcggggttttcgtttctttttttttacttttctttttgtttttctcttagatatctttcctcttaccacattttgtctttttttgtgactaagcatccgttatctgttatctatccatctatccatctatctataaatttataaatttataaattagcaactatatacaagaatatatggaatatatcattgttatttttttttatatttactaatattaaatagtattttttttcttcttctattcaatactttcattctcatatttgttcatggatctcagggaggcaagtcatatattatcatgaaaatgtcttttattaaaattttatcattatatctgtttgtactgttcgatgtagtcatctcatatccgttgaatttcaatgtgctagatgaacatactgagaatagtcataattatcatcatcgttatttcaataaagtctttattgaaggtaatttacctcaacacaatatagatatcacacctatcgatcgaacaccttctttgactccagatataaaatatgcagtccatggagaaaacggcgtcctgagttcagatttacaattctgtaataatcttgtgatagataaaataatcaaattgtatccaaacgccaatgcagcagatatggccgtcacgttgactctctgtataggtatggtcaattttttcaatagtgggataggtggtggtggatatttagtaatgcacgaccattctacaaagacaaatattcatcttgattttagagagctatcaccgttgaaatcagatccttcactatataaagataatgactggaatacaaaagttggtgggctcgctattgctactcctggtgaactgttggggttatatgaactgtttagattaaaagggtcaggtagcgttaagtggtctgaattgttgaaacctatcattgatttgggtaatcaaggttgggaagtcgacgaaatcctgggtgccactctgaagatttatgaacctatatttacttccatgtctgaaacttggttttttgtcttaaattcaactggtaatggggttttgaaacaaggtgattggataaaaaggcctaatttggctcatacgttacaaatgctggctcaaaatgaatctgtagccccattttatgatccaaatggtcccttagtgaaatcaatggttcaaagtgtacaaaactccggaggaattataacaggtgaagattttcaaaattatagagtacatcagacagatcccttgaccgttaaaatcaagtgtttagattcctctattagtggtggattgactgtggttacaagtagtggttcaagttctggcgcagcattagtttcagcactgaaaataatggatcatttccctgacgcaatgggtggagattattcagacgaaacaaatttctatcttatcgagactatgaaatggatgggaagtgcaaggagtagacttggagactatcaaacgcaccagttgccagatagaatattgcaagtactgcatgatcaatggagtgaccaagcttaccaatcaatccaaaatcaaacagaatgggatccactaaataatgttctgaaatttcataccatgtcgaattatacagattatcaaccagagtataagatgaatgaacctcatggtacggcacatataagtatcattgaccatcatggtaatgctgtctcattgactaccactattaatttgttattcggatccttagtgcatgatcctggaactggggtaatctttaataatgaaatggatgattttgctcaagaatccaaaagcaacagttttgagttggctccatcaatatacaatttgattgagccattgaaaagaccgttgtcatccacggcccctactatagttttgaatgaattaggcatgccagatttggtcattggtgcctctggtggttcccgtatcactacagctatcttacagagtctaattagattatattggtataagatgccactcttagagacaattgcatatccaagagtccatcatcaattgttgccagatcatgtagaagtagaaaatatatcaatgataggaaagggaactatagccaaactaaaggagatgggctacgcagttatagagcaagtaccaaagagtgtggttaatgccattaaaagagatcgtttcggatggatcggtgtaagtgattattggaggaaacgtgggatgtcacaaggatattaataggagaaagaatgaatatgaaatcaatcggttagctcggattttttaaaagtaattgctattctaactatacccattgtgaaagaaagtatatctttaagaattttcatatctcataatagatttttctatccttttttggtttttttattgatgtatgtttgtgtatgtgtatttatttatatctttctctcttaagaattctctatataatgttggaatcgtggtaaactattattaattgttattaactattattcttctcttatctttgccgtacataaaccattcagtagtggtcgctacgcaataaattagttgaaaagaagactgagtaatctcttcctttctcatttttccactgtttatagaaattatttccaacaaaataagactacacacaaacacctatatttctttttcttctaatggtttgtaaagtttgtgtcttaaaaaccctaatatttgtcaggttatttttttattttttcagaaaaatcattgagggttgggggaaaaataaaaaaaaataaaacgacaattttatagagtagaaatttggttgttgtggttgaaatctaaattccctaatccgagatttgtgcatgaaatataaaatatttaaactgcactattttttttgttgagtttaagttgtgtaaggtatatacaaccatacggttattattgatgctttgaaacaaggtgccgggttaatgttggtttctgttttatcgttttatattttttttagattgacttaaacgatactaaatggaaagtcaatagagaacaaaacagaaataaaaacagaaacaagaacaaaatgccatccttatttaaaagaatatcctttgaagttgctggtcaagcaaatgaaagaactttgactttatcttctggttccaacaacggacactatatctccttgcgtcctcttttgaatccatccacaccggaagaaaaggagttcccttgggaatgggcttttgctggtactaacgacacagtggaagtaaacaataaggaaaatggttgtcaacagatcttcgattttgggttcgatgcaaatgtttatcttcaaacacctaatacccatagaggtccagttgatacattttgggcaacttgggaatctggtttgttaaaagaaactggtactgtttacccatttggtaaggataaagatggtgttgattttgttgaattgtggcaacctattgatgctcaaagagacgagtttgtcatgcaagataaagcagaatctaagggtagatctgttactttcaaagttgataacgaccaattttatggtttggtagtcgtggttggtagatgggctcaaggtgtcttggcacaaaaaggtaagtccactactaagggtttgaactttattcgatctgtagaaactgttagtggtgagatcaagaacttaatacagtttggttctgatgtcagtaaattcccatcttttttcgctagtgtcaagaagagcgacaaagttgaagttaatggtttaacttgggatgttattgaagcttatttctaacaagaaaagcagaaataaaaaaaaaaaacaagggttgcgttatttttgttaggaataacaatactatcagtattttacaattgatttttgtcatttaattgtaatatccacgaatattgtgaatcatatataaatgatagatcttataatgataaataaatatagatgttattgataactattcagagtttttagttgagttatatatatatatatatataagtataacgaacctatagttaaataagaaataatatattttattttatttgtgataattagttttatctttcaaaaagtttgagtatgtgatcttacctatcttcacgtagatttttaaaaaaaaaaagatgaaaatatttatataaaaaaatattatatacaaatattatcataaaatattataaaaatagtattgatagcatattcaatattgtaaaactcctatttctggtatattaatttcatgtcaatatttgacaattaacagctactcaattaaatacacatatatttttaactaataaaaataaattgattcattgaatatgcattatttagaaggtacttatttttttcctgcacagacttttttataatgactaatctttataatttagataagttggaaattccactttgattacagtttcagaaagtgtatgtattatttctatgttaaacttttttgctatttttataatttttggaattaaaaaagacatttatattgtgatctatttgctactgtatgaaaataatataagtttttgtttattgttttatgctcctagctttaaatatactcatgcttacttttttgtttttagaaaaagaaaattatatatataatataccataacaatgatatcaaaaatctagtgatgtatgtctagttggactgtgttattaaaaaaagacaattgtttttatccatatttattgaaaaaataatagatgtgcttggacaaggttgttagaaaaatatgttttagttattcttttgttttagtaattgattttaaagattgttggttttgataatactaaagcaagaataagccgtgtgattaatagtttggtaataatatttcttctatagttattttgacttattgcaagaattaactaagaatttatacaagttgtgtaaatataaacacgatgagatttgcttttttttaattattattgaaaaaataataaaggcttatctctaaatatatttatgttttcttgaataaaaaattttagaatatttaattaactattatatgtataatataccaaatttacataataaaagttgatatattttaacaaactttagaagaaacagtttcttgtacctaaaaagaaaaaaaaaagaaaaattgtgaagttagtaatatccagaaacttaaagaagaagtttgttccattggtttaaaaaaacattttgtattctgaaataattgaataagagcaagtcagtataagaaaatgagaatagcaatagaatttgttattcttggcaaagaaaaaaatgctattagaatttatggtttttttacgaatcatttgtattggtggatgaaaaaaatgaccatacttattgatacatgaaaaggactaacagaccaaagaactataaaaatattcaatacaaaatatttattaaacttaatttgtgtatatgttgactttcttgagttgcaaattgttgctagttcatttccacattattaaaagtttactagaaatgctataacttttgaaattttttattgatatttctcttcagtattgaatatttataactctttataatgtaagggtatgatatatttaccatttttagtatttgaaaaccaaaaaaaagaagttctggagtttttatttttaggaaatagttatgataatttctatttagtaagtacatttcgttttccagcactatttctataaaatttaaaaaataaagagcaaaaggaacatcgactgaattcctcagactaaacttatacacacatttttcaaaatagatggtttgttaagtttttgggttatttccatttgttttatttttcacaggtgaactcaccaaggaagggtgatccactaaataatattaatattttattaagtacacattgataatagatcttagtaaatgttttaaaatttttattcatttcaaatcttgtattggagtaaggaactatttattagtaatttcttctttagattcttttcggaaagaaaaagtttattcattttcaaacgtttctttatgaattttgaatacaactaacgaaatacaaaaatttcaaacgatttaaaatttaataggattgtagctattatataatcaaaactctgtttgttattagacatatttatgtgagaaattagaaatattttcaaaaatatgatcaatagtagaatattacaaaatatatgctattattacatattaaataaatatagtgataaaatgatttaaaaataatatagtcactaccatttgacttataagaacatttaaatttcacacatatcattgaaatgcaaaaattataggaaatcaatatatattggctataaattaaatatttttatattccaacactaaatttcctaaattatttcaaataagtcatggctaatctagggtatggttaagattaaaaattatttgttggtgatattcaaaatatatgacaaattgattttagatctgttggttttcgcagtaatgctataagaaattaattttttcaaagtcaaaaaggatagtataagtctataatttgaaactagtaaaacttcattaaggttaatcaactgtttgataatctttttaaaacttaaaaaaattctgttttagatagagaccattaagatattaaaactaaagaaatttaccataatccaaactgtaaaatttatggatcatactttttttatcaatatagctctctaaagatatatactttaaagtcaattacttcattaacaagcagtatgttagtataagagggtaataataaactataaaaaattctaatggcttaaaattggcaaatattttcaggtcttctaccttttgagaaaaataaaaaagtcaataaaaaatttaaacttgttttttttatttatctctttttctaaactaactttagtaacccttatttttatgatacgcaaactacaagctattcacaacgaaactttaataataataataaaatagatccatacagaccataaattcattccatatggctcaatgggatattgaaactgactaactacacaattttatgcaaaccaactttactggataaagaggtagatgtaaatagatacaaactttatgaatatggaaaataaggatgctttgttgattaaaaagtttacaatatcatctaaagtgacaccattaaatatacttcataacacgtgatattgcaattccatactaaaaatgaagggtgcgaggttcgaactcgcgcggacaccgtccaacagatcttaagtctgccgccttagaccactcggccaaccctccggaacatcctgttttctttcgcagaataggataaataattactatgattaaagaattgaggtgcagttctaattcactagtgcacctagattaatgtaataaattttagggtttaaatcagtcagatcattaatgtactaatctgaataatcgatcgagctccagaaaacacataaaaggacaacattttctggagataaaagatcatcttccataaccgtttcttgtaaataatttatatattatatataaacataaatagaacaacaagcaagtagcaagaagtaacttcgaataaatatttcagctcgataaaaagctgctcaatatatatgaccgttttagtaattatattatcgactatatttgattactgtcttgattatttgaataactgttaatattatttgcgctttcccgaaatatacaaaagaatttgaccatttcatattatggcagaggatgttatagtttggacttaggaccaatttttttaacagtactattgaacgaatagtaagggcaataacaaatatataagaacgttatatatatctaggagaattaaacgattattgcttgttcttttttgtattatacaatgtgctacatatttataaatcaaccaaacatataaatttagataccaagatactggtcctttatatatgaactatgggttgatagtttcttatttgaggttctgtaacgactgtcaccgtagatacatttctccttaattagctatttaatgtttcatgaatgtttcattttgttacatagtattcaacaatcatgtgggatttatcaacaaaccctaagtcctatagatccaaactagaacttttcttgacaatcatcacaaaaccctaacaatatttttataatcataatatcaaggttgatctacaacagaggacaacaagattttccgatgtagtgtaacggctatcacatcacgctttcaccgtggagaccggggttcgactccccgcatcggagtgtactttacgatgccagatgtttttttttttttgaaaattgtaggggtcgaaaataacgaaaagcagtaagaaaaaaattttttactgaaaaataacatgaatggaatgatagagataaaaaggattccaccatttgcctgtgttagtgtttattaaaatactttgactgtcatttattggtgtacaaatacgtttaacaagctttatttcaatataggaatataaactgattaggaaagttttgtgagaacctgtatagctatatatatattaccttataaaacgtgggggcaacaaaaataaaaacataagttataatggcaagtgcatcattatttatattagctgttattgcaaactgtattaatctttttggacaagtccattttaccattctatacgctgatctggaagctgattatattaatcctattgaattatgctccaaggttaatcaactagttgttccagaagctgctctacatgctattttatctttattatttttattgaatggttactggtttgttttcttattaaacttaccaattttagcttacaatgtcaataagatttataacaaagttcaattattagatgccactgaaatcttcagaactttagggaagcacaagagggagagtttcatgaaattaggattccatttattaatgttctttttctacttatacagaatgatcatggctttgattgaaagttcatcaagcgattactaaattaaatattgataaattgaataatttatttattccttttttttttactgggaaaaatatggatataccgatactatactttttatctttaatatatacgtatatgtgtatatgctatgtaattttataattatatcaggagtataactctttaagatagtgtcaaatacataacgttaaacggcaaagaaaaaggtaggaataagagctctctaggtacttgtaaaaaaggtgtataattcttcctatcagtaaaacttgataataagtgaatatattaaaaattgagatatgtttggttttaataaacaaattgtactataaaatctataagggggggggaatacataatgatcgaatagatagaaaattaaaaaaagtggggtcatattttattatatttaaatattcttcttttgattgagttcacctctcctagcaacaaatagattagcagcattagatctttcctttaagacagccactctaaattgtgttagagtattgtgtgcggcatttgagtgacggtaaacaccaccagtaaaagcctttgtagcatctttacctctagcagctttaatcaacgtttcacctccaggatgttcttcgatataagaagatatatcatgaacaattccaccaataatgaccaaaccaggtctagatttcgactgttcttcaaactcttcatgatcccaaactggtaagtcagttaatgatggaccccagtctaatctttgcttaattctgtccaatttcttttgtttttgctgtagaacaccttgatcaatgatattttgtgggaacttcttcaaacctttagcaagccctaataagtatgtggtatagattaaaacctttgttggatcgtattggtaccacctaatagcatttctgtagtcagttgggaattcatgatggaagttgtgataaccttcaccaaaggtaactaaagcagttagccaattgtcacgtggagttcttctgtcgtcaaatggttgtgcaccaatgtagtgagccatggagttaatacagaaagtagcttgttgaatgcagaagattctaatgacaccagcataaataaacccaccaagataatcattaaagaaatagccgcagaccacagttggcacaacaaaggcagctaacagcatgataaggatatagtggcggtgttggaatctaacaatccagtcagtattcaagtcggagatatctgctcttgccttattctttggatttggtttcataatcatccaacccatatgggagaaaaatagaccacgacgggcatcatatgggtctcttggtgtatctgtgtatctgtgatggattctgtgtgaatggccccaccatttaatggaaccttcgacggaagcagcaccaaagaaagcatagatcaaacgtaatggccagcttgcgtcgtatgatctgtgggaccacaatctgtggtaaccagcagtgatagaaataccaccaagaccataatagaagatagcaaacatcaagacattacgttgaagaggaaccagtccagatagcgccacgataaatccagataacggaatcaatataaccaaggtaatattcaaccaattcaatttttgataccagttattccaagtccatggctgttcggaaatatgtattctttctcttgaatcatcattcaaatcagtcatttctttcgaacccattaaggatccaagaccgttaacaactcttaactgttttttatttaaccctgtagctaaaatatttgcttgtttaagatccatttctggatataattgagtattgttatcattattactactattattaaaagcagaaatagtttctacttccagttgtgcagtactcatctttttattgatatatatttggtttatgtatacctatggtgtctttatgagctgtagtgtgttgcatccattaggagagtatgagtcccaaaaaaaaaaagaaagaagagtgagggaaatagttagatgtgaacagaatgggtctgccccgactagaatacgagagggcatctctatttatatattttcttgcttgtttgattccagtaataaaaatattttgactgttgttctcagtattgacaatagccaattttacgatttgttttcagttgatgatacatagaattgcacagaaaataataggatagttgtaaaaagggataaaacccatttgacaggtgttctttgaataagtgtaattgttgagcttgttatttgtctatgtagaaacaaacaaaaactattgaaagcaagagatacaaaaaaatagttcttttgagagggatataataaaaaagatgtaataaaagcactttattggaattttttatggcttgcacattttaatcaacttgttagttaaaagaaaagggtaagaaggacaagcctaaaaaaaaaacatacagaacaagtaataagaataataaagctatttttcgaataataaattgttttagcttgaacaataattaactattcttattatgtttccaatctgcttattattattgttgttgtttttgttgttcttattattattactatttggtttgaaataaaaaatgaaaaagtttgttactaaaggaaataacttaatggtttaagagaaaggtagtcatcttgattttctcaacaattgtcggacagataaaaacaaaaaaaaattgtccgtgtttcatttatcgaatctatttttgttttcatttttatttttgtctccttctctttttatttaactccgaagaattggattgatttttttctttttatttcattaattaaaacaaaaccaaagcaagaaaaaaagaaaaagaaaaaagaaaatacaaaattttgtgtaaattggttgagagtttttaagaacgatattaccgattcgattaaaaaagaaaaaaaaaagcttgacagaaaagacaacttgaattacataaagaatagaataaagggtccgttattgtatcaagattcacgaaggtaaagagaaaaaaaacatcttgtttgtcaaagaagcctgaaattgggttttcttgattgagttcaactctttggataatagtttgtttgtcctattccattgaattacaatggtttatcaacagatttatacttgttatagtattattaggctgcttaagatcgttggctactttgcagatgagagtaacagactgtaagtcttggttgtttgtgaaaaaattggtttatatgttttctttttttttttaacaaataagtttcgaatttatcattttctcttaatctaaattttttatagttacaccttgagtctgacacaattatttcaagagatcctggtgtgctggaaggtctaaattggttggtataacaactcagagatgaaagagttcttccagtattcacccagttaactgttaggctatttataattcctggcacaacattatctattttcatagtggtatgttccatctactttattaaatgtagcgaataactgcttataaactacactgcttatttttttttaaaaaaaaaaaaagaaaaaagcagtctgaaagtggttgataactctttacctttttttgggattataattcaattgtttgcaaaaatatatatatatatttttatcctagaaattaaaatgcactttcatgaaaggtttttcaatgatatatactcccctaacctataaagcttattagtgtattagaaggatattccaggtaaattgaaaagtaataaaaaaagaactcttatatctcatcttttctaaagaattacatggtatatatatacaatataactataataacaaaacaacttgttgtaatttatatctaactttttcaaaaaaatgatatcaagtatttttttttatatgtcttttgtcacatatttaaacaagttcaccacgaactggaattatatatgtggtaattgtaatgcatctgattatctaatactaattaagtagtttttttctttttcttctcttttataagaaacttgcaatacattagtagcagcacttgcattatctgtacatagaagtacagtcaatgaggatggttgatatttaagaaaatatcattaatattgaaaaataaacaagaaattaaattttttttagcagaaaatcacctttaaaaaaataaatacttctaagaaacaaaagaaaaacaataaaaaaaaaaaaagaaaattaattacacatagtaatttactctaactaatattaacgaccaagaaatatttaacacctttttaattttatttctacataatgaataaataaatgacttacatatatggtattttatttaagtttattttatttttcaaaatctaaatcttgccttaatcccataaaaagaaaacaagtaaactaaaaacattattaatatattactatcagtttatctatggaaattaaccagaactcaaacaatacaatttaaacgttatatgtatgaaatatatcataaaaagattataattatttgaaggaatcttttctttattcctttcttttaggaaagaaataagtacatcggtagataaagacagtatttttctgttatgtcaaaggctttaatctttttgttttccagtatttctaagttttggatatttcagctcttttttcttcctttcctcctttcccccattttgctgaaataagattagagatatatgtgataatctaaataaatgtaatatagggtatgatagttatatatatatattaagtatgtagaacaaaagaggacgagtaacataataacagtttatagtaacactaatattcttactataaatagctgagaacttataatgccatcaatatcttattgtaagttatattatcttattatattaatttaaaatgaactctaatagaatttttgattccgaaacctttatcttacttaactcgtttgctctgagacgaaaaaaaaacgcgaaaaactcgaaaaacaaaaaaaaccaaaaaaaaaagaaaacgttcttcttacacccatacacctcaacggttgtgcttgtttttttttattttattttattttatttttctttccgtctccgtctccgtcgctaacattcaaaacacatcatcattgtattttcaacaactatggctaaaattacactactgctgtaatgaaaaataattttagataataatcaacaaaaaaaaaaacaaaaaattttcctttttctttgaattttttgaatttcttttttgcttttgctaaatgtcgtggtaaattttttttttttctgttttatatgcgtgacactctgttactatagatcaaacacgttaaaagataaacaaaagtatttagtgcattaaaagaacttttacttacacaaacaaatacacatacgcatacacatacacataaatacacaaatacacaagtacatatatatccttatacgccccctacgtttgcatagaatactgagaataataatcccaatagtatttgtcgatagtaaatttattactattattattattggtatttgaagttactctacttttgcactacacaaagtttggaaatttcgcatctttaatacatacatatatatatatatacatatatatatggattaattctcttcatttgtttttttacctttcgaaaacaaaatatttatctcatattttcttaattgttttacatttctattaaaatactataaaagatgccacataccaatgataatatactgttagctgttcccaatcaaccaaacaaaagacatgcatccatagtagaaatgctatcgactcctcctttattacctagatctgtacctagtcaattgaacaataataacaataacaacaataacaacaacaacaataataataatatttccatctccatcactaacacaaattttatatcaaatgtttattcctcgtctgataatattgttggctcaagtttatccactcattccactcccaaacatagttacactaatttaaactgtatctcaattaccaatagtcccactagtcatagttccattataaataataatagcactaatcattataatattaataatagtcataataatagtaatagtaatagtaatagtaatagtaatatcaatagtaataacaacagtactctaaatgcacctactataaggtttaatcatcatgtatttaattcaatagataataacatagaccttgtggataataatactaatagtactatagatcatgctactttaaatttgacaaaaacattcacaaatgactctatgacatcttcaaatggatccatatcttctatgtctttatccttatcctcatttcaaaataactatactgataatattatctataataataataccaataataacaataataataacaataatagtaacaataataatagcatatctaattgtgatagtaatggaatcgtacattccatcagtaatggttccaatttttctttgacaatgatgtctcaatccttaaatactgtacatcaacaaaactggcaatttattagactgtcccagctaatcgaatcaaataaattgatctttattaattcgttaatctctgtcgaagatgccttcaacacattaatgaaatatcatttgacctcattacctgtccagactcatccaaaggacttaaattgtttgactttcgattataatgatttgaactcataccttttattggtcttaaataaaattaaaattaataacgaaaaacttgctaaagattgtcaaaatggtgaaaatattaaagttggagaattaattaaatacacaccaaaggaccccttctataaattgtctgaaaatgaaaatttatccaatgttatcaatattttgggttctggggtgcatagaatcgcaattactgacccagatatgacacagattaaagggatattatctcaaagaagattagtcaagtatctatgggataacgcaagacaatttcctgatctagaaccgctattgaatatgtctttaaaaaaattgaaaattggtgtttttaacgataataggaccactaaattaacatcaagaaattcaccagtgatatcaatccatggtgatgaaccattaattaatgcattatataagatgcataatgaaagaatctcgtccattgcagtcatagattcaaataatatactgatcggaaatatttcggttaccgatgttaaacatttaactagaacttcacagtatcctttattacagaatacctgtaggcattttatcaccattattttaaataatagagggttggagaatggaggtaaggactccttccctattttccacgtttatccatcatcgtccttagcaagaacaatcgctaaattagtagctactaaatcacatagattatggattgtgcaaccatcattaaccacagaccccgatcctgaacaatcacttcattcctcagaagaaaatgatttcaacatgaataaaccattttcaacacatttagtagaaaaggatagaaagacgggtaaattgattggtgtcatctcattaaccgatatattaagtattttagcaagaaatcaaacccagcataaacaagttgatccacaacaagcaagaagaaatagaaagtaattcaatataatctaggtagtatccatacattcacacatacatacataaaccacatatatataccgtcttaattatattaaaaatatataaaactttaggtatacatctatataacatcttttgaaaagctagtgttcatttgttgttaattttaaatatttttgaaggttaagccttctacacaatttcgtaaattttttttctttcaaaagattacaacaacatatatagtctgatactatttagtagtctttctctatatttatcatttattagtactggagttattctcaaaatttttgtatattaaagaattcttataccaattaaaaagtgtattatgatgacaaaactatatgtaatattcagatacatcgacaagaaaattgtaaaagagaaaagaattaaacataaaacgatcacttatttatatatgtcatatacggatatttttatagtaagtaaaaagatatataaattgttattaaaataaagcctttatttaactagggaattctttaatatacaatttttttgataataatttcagcaataaacttctgtaatataatagaacacatggtatgtgcgttgaaactaccgttgtatcttttttttgtatgtattttgtattctcagtatgttttaagattaaaaactgtgaataaatcacctttaaccttaatagggagcactatatgctcttaataattatttttgctaatatacttaaaagtgaatatatgcaaaataactgaattatctgaatcttatagatatacatgttattccatcacatgtgatttttcaataactggagatatcctaatggaaatttagaaatggaactaattgaaaaactttgaactattcatcttcaccagaatgatcataggattgtgacttatctcattgaattacgaatacaataaaattacaatattaatttgatatcttatattatgtactatttaaaaatccgtaaaaagaaggaatgccaatgagttaagccttgttggcgcaatcggtagcgcgtatgactcttaatcataaggttaggggttcgagccccctacagggctttctttttgctttttgttgctaagttactttagggttttgtttagagaaatgagggtggttgacgatatttttcgaaactttcctttttgcaaaattttacaaacatagataaaagttgaagtaaccaacataagtacaagagagcaacagacgggcaagaggtattaagattaataatgaatagatattaaatacataagtaaatactatttaattccaagagatagagatacataaatatgtattaatataaagaacattagtcgagtattatatacctgtaactaactaaatgttcgttggatattggagatagtgtgacaacgtcaattttgcttacaaatataaatctaaagattctaaaattacatagatgaatttagtgataaaatgtcaggtacacaaataataatagctaaacttaagagacactatacttactatatacatatatgcgtcttgtttcttgtttgtccgtttatcatgccgtctaagtctttatacagtagccttctgcaataccattatatcttgtcaatttacactctataaacaaactttccttcaataacaacatgttgtaaaaaatttacaaaatcgattggaaagatacagtatactgataattcatgtcatataatatgacttatgcctctcaatcacctgtaaaaacttatatgtgcaacataaacttatataaaagagactcgttgattacctctataatcaatatgtatttaaaagataagtatacgaagtcaaaggcttgcaatcatatatattctcaaccttggtcattgtatacttttatgcttctgcagtgatgcaggaactctttataatgctttacaatatgtacatttcacatcagccataaataacaataataaaccctgatataaagccaatctgaatgacgatttattattgacttgttaatcattaagaagttgctaaacaaaaatattattaaaagaaatatgtgaatatcgttcggggttgaacaccttcataaatcataagccctctattgatttactaataatataatggtaaacaaagtatatactttcatcaatactttagttttttaaaacgaacatacaacattctaagttacacacatctactcacaaaaagttgatatacatttgataccaaagccagactcaaaagagaaattctttgaaaacttatctaaaaatcctttaaagcacaggcatatagatcctaatcagatgtttcaaaagtttttaatataatattgcttcgctttcttgtcgttgttttacaattttttgctctgctacggtaactttgttttttatacatacttttaaaaatgactaaatttaaacattgtctgcatattctttttttcttcatttttatatataagaaaaatatgttatagcaataataaggacacagtatttcagtacaaaacaaagacgcaccaaactgtgtattttggttaatactgcttttaaataaaccaaggctaatagatatccaaaagttacaaaatgtctactccagctagaagaagacttatgagagactttaaggtatgttgtttattaataaatatatgcattcttttttaataatacagtgattattatatctatattaattggaattattaatactaacattagaataatacatttctatatgtctatataccttgtattatttcccccctttgctgtcaatacttcttcaaaatagcgtatgaaggaagatgcgccaccaggagtctctgcttctccattaccagataatgtcatgatatggaacgctatgattataggtccagctgatacaccatacgaggatggtacctttagattactattagaatttgatgaagaatatccaaataaaccaccgcatgttaaatttttaagtgaaatgtttcatccaaacgtatatgccaatggtgaaatatgtctggatattttacaaaatagatggactccaacttatgatgttgcttccatactaacatctattcaaagtttatttaacgaccccaatccagcatctccagctaatgtagaggccgccacactctttaaagaccataagtcacaatatattaaaagagtaaaggaaacagtagaaaaatcctgggaagatgatatggaagatatggaagaagatagtgacgaagaagatagtgactgaaatataatggagaaaaaattccccatcaaaaatttttaagctgttttaaccagttagtgcatatccttttgatcagtcagatagattccgcaaacataattcgtgcttctattaattctatttatatataaacattctgtatactaaaaaaatacataaaagcctattcacaggaaaatggagactttgtctcggaacagttcacttcaacagaaaaattctattattgaacttgaaaattgttctatatgaaatcgaagcttattgagttatttcaattttttttgtatcttgaaaactatgctttataaatcctatagaagataataagataaaagcactaagtatggtgctacttaaaatatctttctttggttttgttgaaagaaagggtgattcatcaaactttgtatcactacgtggacctaatggaccatatgccataaaatattgtaattgtttaatatatattggaagtgttttccaatctcttgagcacatatctgtatctataacaaacttatgtattgcatcatattccacgggtgccagtgtcttgaatttactaatcattgaagagaaatttactgtattggaagtattttcgaactgaaatttatttttgagtaaattcttgaacttagaactgttaataaattcgaatagttgatcttcatattctttgttagataatgattcatcttctttatttactgcattaggattaaataaattaaaaacgtccgatatggcgaaacttaaagagtttccatcttttaaagatttatttgaattattctttaaacgttgttcttgttttattaataatgatttaggtacttctcccttaatatattttttagtttcactggaactagaaataaaccgcttcaaaatataacgataatttgaacttttaagctttttccatgggtacatgctgtattgcatcttatttcgaaacgttgatttagtattacatttacccaaatatttaactgtaagaattcttactgttagtatatctggtattagaatggatattttttaaatattaaaaaataataaatactaatctcaagtataactatcttttacaattatacaaaaaaatatcaatagacattcaagcaaaactacgattaaatatagtgattaaaatctcagatatatcttgaacacagatatagtctttcgatggaacatgttttttatttttcattttcagtttcagtccaaaatgtttatgtatatagtctgatttagaaatagttctacatatgatacgaataataaataatgtttcttatgaatatatataagaattgttcatttcattaagaaaatcaataagaggttagattaaactttatctagctgctttttttttgtgtgtgttaataaatttcctaattttaaaattgtgtctacaccatactgtggaatagaatgtaaacatagttcaccattccaatattctgcataaactttacacatagcgaggcctataccaagcttataacgaaacgatctttgtgacatctcgagtaagggtgcttgacatttaagtgaacccctctttaaatcccaatgagatattggttccaaagaagttcttaaatagggcttggtcataatataattctttaaagtttcctcatccgacccactactttcaaaagtattaatcttatcctgatatatatgatcatacaaagatacagtctgaagacctggtagtcgatggaaatttcgtaaagactctttggttctttctttagacttagaaaatgaccaaatattttcatttggatgcaaaatacctccagctctatcggatattttaaatatatagctttcttcatttttaattattctaataataataggtgcaggcgtttcaagtcctttttgaataaaatttttcactgttgcctcatagatatttctaagtatttcatttaacatatatctcaaatgagacggtaaaaaataaaattttaaatctgtttccccttggacaatgagtttaggcataggcaaatcatcaaaatatacatctttaataaatttctcacaagtttttgaagcttccataatataatccatcgctgaacattcttgaaaaatatcgcctaagactaacgtattctccttctttccactcatatagtttgcagtaacacttagatgttcttcaacaatcaatcgcctagaaatacgagctcttaataactctgacagtagagcatccattttatcagctggatataaatctaaaatagagcattccaatgcacccataatcaaatgaggtaaatttaaacagttaaaatcctgtaatatcttcttagtaaattctgcaaatttcaaattatcatctaatgttttaattgctgggaattttcgaaacctttcaaaaatatcataataagactcatatacttgtgcaaaatgaaaattgtttacaacatcaaagggaagattttgcaagactaataatttaccagcaattcttatagctaactcttccttaacaaatcgacctgaattgataattttatttttggtaagacccttataatcatcatagtattgggctaattgagtcaaagatacaggatgtggacgtttactggcatactcttttattaaagtcatctggttatgataataatgttgctgattaacatacctggagccatttgggaaagccttcatgatttcataaatatatggtgctaatccatcctttactggctgaattggtgaatatttagtgaaatccacactttgcgatatatttttaggtgctttgacatgctggtatctagcaaaaaccttttgacaattgacatatgacatattttattttcaaataagtttatgagatatgggaaatattagttggatataccaatactccaatagtataacacatttttcaaaactttcagtttatttatatgttgttatgactaacttaagcttttcaaatataaagcatctgtctattctaatttatttttattaaaaagaaaaaaaagttggaaaaatcattctgtcaaccagttgctaatgcatacatacatatatactcagttatatacacaataacatgggataacttattgctcatgttgtctgattatttaagaatctacctaatgtatcattggcaagtgttataaattgtaattctggaactttatcatctttctttatagatgaaatttttttggtaattctatcgtcaatctctttatttataacgtgtagtagatctctattccatttatctcgcaatccgacaaaaaaattcatgtaacttaatgtcaataatatgtcatctctcttcttaaagttaagttctgaagtagtgttttctattgccatcattgccaaactatgaattgacgccattctatcatctgtaataggtatatatggcctaggaggcagctttggtggttcagaggtgttagaaatacttatattttgaataccatctgtaacaggagatacaagagatttttctgccaatgtgataattgttgtagaactttttgtcattaaatccttcaaaatcttcaaaatagtgaccttcacacttctataaggacatgttaataaagtatcaaagataaaatcataacatatattctcaggaattaagcataatattctagtgaataaagctaatgaaattttttgaatttctttattaaaagtagaataggtctttaataaaaacatttgtaaaaatgttttaataatgattggatgaatctctttaaactgggttcttattaaatcaattgatttttgggttaaacaaacccacaaccaatatctacaaacattttctaaacccttattatcatatactggtgactgtattgatgcagtagaacatgccaagtataaataaataagtgattgagtattaatatcagatataagatctttctctttatttataaaataaaacgcagaaagcatgacaactccctgtgaatcaagcttcaaagttttattatccaaggatttttttaaattatatgtgtatgataataggtataacatttgatttgtttcagatttggattctgtgatgttattcaaaaagggttcatatattttttctacttcagacaaatatttaagaaattcctctccaacattaatctgatatttgtcagctaacaggcgatactctgcacacaaaagtctaaaattgttatccatttcattgtttaaactcttaatatactcatttttccccattaaagaataatagtataatttgtcaaaatttggttcaattttcttatagcttaagcttattatgatagacaaaaattcttgtactaactttaaaacaatagcattttcatcaaggactaatttattataatcttctttggaaattgaaagactttcattatatggcacgatgcttggttgatacttaaccagtaattcaccgacacgatgaagaaggaaggatggatcctctattaacttaacatttgcctttaggtaactcaaaatagaagatataaccatacctaaaaattttgatgggtacaaggtatcaattctatttaaagtttctttgagtaattgaaaaataagatgtaattttagattaggaataaattctaccttatttttagcaatatactcgtattgatcagatgttggtttatttgatgctttaccatctccaattacttgtttatcgtccagttggtcaaatgattttatcacttcagttttgttagcattctttatagataaccttgtgtaatccacattatcaggagtgcatgagtctgggctctttcttatgtcatcttcaccgttgattgtgtcaatagaaaaggatgctaaaagattacatcctattaacaaacactcctttgggttacctaactgagaaattagattaaaacacttaataacattagtgatgatttcatttttagttagtttaacatcaaagtctacgttttttggagtaaaaaaatctaataatattttaggcatatcccaacctatctcttttatactatcactattactttttaataatttatagagagctgtcaaatactctacaatgtcttcccgagatccttctttattaaactgagcggcataaagatctattattgtaatcaacgtaacaggatccttgacattttcaataaaagcgttttctaatttggaaatcaagctatctttagtttgagaatccatttttcttatatatatgtagatgtatgtagttacgcatttacttgttgttaaaaatagattaaaggaaagaaaagcaccgagaagtgattgatatttcacactacatcaatgtgtttccaattgattatgcttaactagataaaactatgcttacaacatcacgttttttgtttagattaataatattatcctttcagctattagatttgcagcctttcggtggtggtggtggtgatattttttttttcttgtaaataacttttttttccgatagattttttaggacttttttttttgtctttaaagaaaacatctgaaattcttaaaaaaagtacaggagtattattgattatatatcaaagatgaaatactaaaatagaagtggaattcatatggtattgtccaatactaattgaattgaaaacaagcttaaagatattattgtatgtgtgtgcaaagagaattaaacaacttgattatctaatatttgtgattacaatagaaataaatatgtcagatgaatcttttgatgagaaaactataaacaaaattatcccccaaatctttgaaaaaaaaaggaatacaatagacagtgcaacaataacgtccaaattacaagcatctatgaatcaaatatcatttctagctacacaatcagtcattgatgaaagaagttcacttgataatattattgaaacaatagataaagtcaataatacccttagtactatcacaccaaagaatatgaaaaggatatatgaggtttgtaagtctaccaatgcaatccttgacacatgggttgacattcaatcgcaagcaatgtatttaaataagatgatgaaaaatacaaggtatattgaacatttggaggcacttgaaaaaggacatgatattataggtgaacgtgtagaggaaataaataggttgaaagatgaactttctttactaagaggccaacaaacgtccaaaaagattgataaagtcagttctagtagtaccatggggcgtttacaaagaagagtcgcaaatacaaaaaatcaaagaatttcaaggcttgctaatggtaacattcacaattctatctcaaaagtatctcaaaatagaaatttatcaagtattccacgggtttcttctaatagaataacaaaacctaccgaaagcagtttgagaaaaacattccaaagatagctaaccgatttttttacactttttttgaagatttgaagaagtgtaaatattgtgtttgaaataactatttatcatattatagtgcatggatatatgtgtgatgccatttgttagttaaaagatagttgattaaaagtatatgttctattagaattgataaattaaggaagtttttaacattaattagtttggttttaactcaagttattttattgttattagtattttctttcctttttttatctcattactataaaaattctatcaagccgttaaaacataagtaatctcttctttttcttatatttgtcttaaatggaagaagtagactgcacaaaaaagataaatgaaatacaataaattaatgtatcttcgctactgttgtaactttaatgtcattatctaaatacatataactattaatttattatatattacacttacaaaacccaatatacacagttaccttcttgagctggttaacttcaaaatttttcatatatactgaaatagtctaaagaaatgtgattaaaaatcaaataaatcaacgaccaattatattataacacaaatgtaaatagaatattggaaaataaattcatagtatatataagttattccataatataatgtagtatagtcattgagaacatcacatttcaataaagttattgttgccaacgatttaccatttcgttcattaaatgtggaccttgtgattgtagaaaccttgggagttcatctactccatctaacataccattttcattaatagtagcgtgtgattcaaaaaaaccattaatcaattttaagacatgtagtgcattgggatacacaatacattgactgtatggaggttgacaccaatattccaaatattttagataattcttaaattcaggactcttccaattaaaattataaccatccttattattgctactctgttgttgagtgaaaagatacgttacgtatggaagatttgctaaagattgaacgaactctaattccacttcaaacctagtgggtaatggattgttttcattttgttgaatatttggagtttcatccatattatttatttgtaaaactgttgattgtcaaattttaatcgcatttagttattcatgatacacatatatacgctactatttttttcctgccctttctttactactagtcgctgttatacactgtttctaatttatatttcatttcaagattcgtttgtttaatattctatttcattgtaggtgtatgggtgtatacaagcttcttactctaagagacttaggcggacacaaaatttggttggcgtggtttctttttaccatcatcccccccctgtgtttgaatgtcgaggcatatataatacttgggtatatgttggtttgatagacaatatactgtctatatattaatagctggaaattggatatggtgtgatatgctacgaataatatcagtacacttatattccagcagctttacaagtttatcttgtaaggatatctctatgttatcactcttactatgttattagggaaagatttgacattttgactatttaacaaaataagtgtgaaaacaagaaagtaagaaacatacattagaataagtgaaatagagcttagtgagtataaaataaacgggcttgaaaggagtaaggataaaaatgaccagggattataaacatatatataaatggttgacgttactgctatgtccatctttaatagcttttggatacttgctgtcattaactaagtatacaagattatttattgaaattaataaagatgggtttgttaatgttttttttgttaaaaatggttggttttggacaacaatgattttattttggtgttgttatagatatagaatcaacaagaaaaaaaataaatcaattttgagaaggtacattattttaactctctggtggtatatttttacgcagcctattaaatggttaaattggccaccaattatggattcgatttttcttctaacaggtggcgattgcaaatttaatatatgggatttagatggtaacttagatattacatttcacaacaataatactaaaagagtaaatagaagtttccatattttgaataaagtcttaacacaattagtcgaaaattacagtaaagacagtaatattaataataaggatacgaaaaaaaatgaatcatatttactagagtcattaaattgtatacgaaatggtggttctcatagtaagaatcaatccttacattgtgacagtagagttaatcaaataattaaaaatgctatatcaaaagaagttaaattaaatacatcattaatgtgcagacagtatggtggatactggaatggtggacatgatccatcgggtcatatttttttactgaccttgatgattatgttattgctaggtgaattaccgaacatgttaaattttgcatggtcaaaattttgtcaaatgaacttggataagaaggaaattcataatgaaactaatgaacagaagaataagggaaatgcaaaagaaaaaattaaagaaaaaattaaagaaaataacaagaatcccataagtatactcaaacaaatcggtaattttattatttttgcattccactacctaatctgggaacaaccagttttaattatgatatggtttttattattgtggtcttggtcattgttggttactacaacaagttttcattctttagcagaacaactttcgggcttattttttgcatattctgtggcgggaatagtatattataatagatgataaaagcgatgtacatgattgcattcatatatatatattcttaaaggttagtattttgggataccgtaccgacaaaaagatagtttcagccatgtgaaggaaatattgctttatgctgagccaggtagagattttattatatgtaaaaattttacatagttaacagtaagattgttggtaaaagacttaagttaccatactatgtttgaaatattggcattttatattaagaccttaaggtatattcatatgtatatatatatatgtgtgtgtgtgtgtttagtataagaaacttagccacagctggtgcagtagttaagtagaacttaaatcttatttttttatcatcatactttatcatcaagttgttttttttttacattatatggctttaaaaagcatgatctggttgtagaagtctgaacagtctatcacaatcacgtatcctaagaggtaaagaagataaactaattagatatgtatctaaggggttaagtggggttatctattatttctgtatgtaattgattgtttaagaagatgtatttcagaaaatttacaatttccctcaatattaacctttctttttctttttttttgttacacagtaaaaatggagatttacacaattttgttttttatttttttggtatttcttatttaggatcttatgttaaagaatgtttaaaaagtctccgataccggccaacaaaaaacaaagaaaataaatacgaaatgataataatattttggctgtggaattggtttttgaaactaatagtttccacggattagatttgaaaaaactttatattgtgtattacataccgaaaacagcgtatttgatactgtttttgaacagaaaagtactaaattattgctggcacatgacattagtatcaaaaactttattgaaatttattataaatattaacacaattaactggcacaaattttttatagagtatttgtagtattataagtttgtggcttacttgtagcaagatattggttatattataagtctgaattgtattgcttggtttaattctactttacctaactatcagaggaagtttgatatgtagtgtaatttattttatatttgagtcttttttaatattactttttataattttttttagtcatttaatattatgaattcaaaattatcaaagatatctttaattgtatttgaacaaaagtattcaatgactgatattttaagtagtatatgtcgtaatttaaagtgtttttttttggatagttgtttatttagtaagcatcctgttttaccttttggttttaaaatattacttttaaattaaaatgtttctacttatatttaacaagataaaatttcaaataataagagtcaacacaaaaatcttgaaatctaaccccagattaagagaaatgacgtgctcttggacacttattttataaagtaattgtagaatgctattttgggatactacttttacacctgcatacagttctatataatatttttacctttttcagtaaacttcgtcagagtttaaactgaatagcttctttctctctatctcccccccaaaaaaaaaagaatatatggaaaataaataaaaataaaagatctgaaaatattaaagtttatcgaaatttacaaaaaaataacttcagagaaacaaggtcttttcaaaataagattgaaaactttaatacatattacacatataatttttttattatatatttaattgttaatacaaattagaagaataaattataaacaaatttgaaaaaactgaaacttattttttttgcatggattgtttactttattggagatctactaaaaaaaaaaaactttttttacatatactattaccgtttctataccctacagtaaagagaagtcatgtcaagagttcagaagctacaaaacaacaatatatccctgttggaaccctataagagttgttgtatgtaaatggatgaatcatatcaattagtataagtatgagcactcttacgtaagctctatgtattactaattaataaccctgatgttgtattacttcttgttgttattcttgtatgatattaagagttgcctcttaatatcattgctaagatgtatttaaataagatgattacccttggcatatctctcaataatcaaaaaccttttgacaagatctaatataattatcactccctggaaatcctccaatcagattcaataccttatacgagccactttgcacatagctgcaccaatcctccacccagacacttaggtattaccctcggaattgcgtatctactgaatttctagttaggtttcttacaaacccattcatgtaaaaagcagaaaagattaaatgtcttgcatttttcaaaatttttagaatattttatcaaataataaaccaataatatgtcttctactatacctaacagtataaagaacaatcgtaaatccagccaatatattaattaacttactttaaaatcaagaaaaattattaaatattttgaaagaaaatgaaaaaaaaatttgtaataattattctaaccagtgatattaatgataaaatgaaggcataaaataagcaaacaaaataaacacagcaaagaaagtcatatattctgataacagtatttgggatgtatctatccttaagtattcttcattagaacaagataaacaaataaacaagtctaatgctagaaaaagaagatcaatgtgagaaggtacaaaatagtattgctccgttagacaaggactgactgaatctttgaaaaagtaattgaagatattgaacaatatcattagttgattagttgattttacctttttttttttattatttaaatttatgtatggcgatatcattagggaaaaaatataatttgttttatgccatttaaaaaaaaattattgaaaatcatttattttctttttttagaaatcccaaaggaactccgtaaaaaaaaatcacaacaacatttttttttaggaaactttacgaaaagttatgactcatttgtttttttttatagtaccattttcctttaatgactataaaaaaacaaaaaaaaaaagaaaagaataggaagcgactctccttagttgaactgatatcctataaccaaccttatcaatgaatttgtacagttttctttaaactatatgcacatatcttagaaaaacccttgttcttaaactaatatcttagcaaacaaataagaatcttaacggatagttaaaattatttgttgagtgtcgtaaaagatccatatgacctgaaacggaaaggtttcatccagaacttatgattctcgttaaaaacttccaaagaataaaaaaaaatacttaagtacaaatcagaaaaaaaaaggacttaataggacaaaataaaatttgcttttccttcccccttcttttaccaattcccttttttcttgaataaaatgcaaaatttcgttccatatgactcaaaataaaaacaaacaagatagtacaataatacctgtactacgtattgtttcaagaaaaaaaaaggtcaaaacaatcattattcacaaaaaaaaatttcctttgttaaagactttatcgttttaagaaaacatagctagggttttatttttgtagaaaacaatctgtcatttaatagagtaaaactttatagggctatgataaaaaataaaactatttatttaacactgtatgtataaatctcatatagatattttgatctcggtaaaaaaattaaaaggaagtaaatgtttcttataaagaattttccttgctactacaacaaaattaacaacaaaattataacttattttatttgattctgttccatactataatcttgttaatcctctgtgctaaaaacttttctttgaactcagcttatctatgttttttataattgtatccatcaccacaaccatcattaccacctcatatatttttactaataaaaactggatacaataaggtgttaatatatttttcccctaatatagtacagagaacaaaaagacaaacttagggtacattatttaaacggagatcaaaaactttttcataaagataaaatgcaaacaagcgaatcactcctccttcgcttttttctctgtcttttttttttgattttcttttttaatccggaaaatttccaaaaaaaaacacatacacacacaaacacacactaatttacaaacacacaaacaagcaaacaaacaccacaccacagttctggaaaccactgttttctaaagaaagtgaacttcaaattttactctttttaatcttgattgtgtatagtattcttcttcttcatattgttattgttattgttattattttttactattgcaatgcttttttatcaggactacctcgggataaattcaatcatatatgtctgtattgttcgggatgagtataggaatctacgcatggctagtgttatataaattcatattttgttaacctatattctcccatcatcttgaaatatacacatacatatatatatatacactatacatcaagttacaactatatatatatatgtatgtatatgcatatgtgtatggtttgtcacatgattctcttctctctctctctgttatgtctccttaatatccaacccacatttcttgtttttatttacccccctagtctctccggttttgattatttcttctaactaactagctaactaagacagctaacaacaataacaagaaacattacataaacggtaacaagatgcatattactgaaaaactggataaatatcatgagacgtcaaataaaataacgttttcttttgaatattttgttccaaagaccactcagggtgtacaaaatttatatgatagaatggacagaatgtatgaggcatccctacctcaattcattgacataacttggaatgcaggtggaggtcgtctatctcagatgtcaacagagttagtagcgacttctcaatcggttctagggttggaaacatgcatgcatttgacctgtaccaatatgcctttacaacagatagatgatgctttagaaagtgcttacaactctggttgtcagaatattctggctttaagaggtgatccaccccgtgattcacaagaatggactccagttgaaggtggattccactatgcaaaagatttggtttcttatatcaaaaaaaaatatgggaaccatttccaaattggtgttgctggttatccagaaggtcatcctgaagaaacaatttcgtcaaataacttgaaatttttaaaggaaaaagtcgacgcaggtgcaaattttattatcacccaaatgttttatgatactgacaacttcattcagtggtgtaaagaggttagagcatatggtatcgatgtaccaatcattccaggtattatgccgatcaccacttatgctgcctttttaagaagagcttcctggggatccatctccatcccagaagaattcatgactcgtctggagccaatcaaagatgatgatgaattagtaagagaagtgggtacacaactggtagtaaaaatgtgtcaaaaattaatcgatagtggttacattaatcatttacatttgtatacaatgaatctagaaaaggctcctttgatgatcttagaaagattgggtctgttaccaaccgaaggtgaagttatcagtcaaaatgcttctaatttcccttggagaaaatcactaaatccaagtcgtaagaatgaagtagttagaccaatcttctggaaacatagaccgtactcctatgtagcaagaacttctcaatgggcagttgacgaatttccaaatggtagattcggtgattcctcatctcctgcgtttggtggtctagacctttgtggttctcagttgatcagacaatctcctaaaaaatctttagagttgtggtcaactccaaaaacttttaatgatattgctcttttaattaacagctatttgactggcaaattagtgtgcttaccatggagtgatataccattaaaccatgaggtcgattcaatgttacataatctattacacttaaataacaagttgatattcacaattaactcacaaccccaaattaatggtattagatcaaacgataaaattcatggttggggacctaaagatggttatgtttaccagaaacaatacttagaatttcttttaccaaaggtaaagttacctaatttagagaaatctttagaaggtaatgaaatgatgacatattttgctgtagacctgaatggaaatttgacttcaaatcatccagatggatcaagagcaaatgcagtaacctgggggatatttcctggcagagaagttttacagccaacaattgtggaaaaagtttcattcttagcttggaaagaagaattctaccgtattattgaagaatggaaactaactctaaaagattataatgcccttgaaagtgttgcattgttagactctttggcacatgattatgttttagttaacattgtagataacgattttgtttcagaagaagacaaaatatatgaattattaatcaatttataatttcccaagatattttcacaacaatacaaattttttttctcaatatttgttatatttattgttgttactcggtctctagccatggaattttaatagtttactagtatttttcatctaattttacatctttggtttctatcgtccaattatattttaactctatttgcattcaacatagcatttttggtgatactacccaccaattaattattatttggcatttcaacatgaacatcttaattagtcactcaacttttaaaacacattgagacaattttttacattattatttttaccatatattttgtaaactagttcttttttatattatcgtatataaatatatcaaaagggaatatatatacatgcacgtctctattactttattttgttaacaagtgcggaagatataaactaactgtaccaagttagcttctatttcttttcttgaaaagactaatattaagctgtcccgaaaattaatcaagttctatttagcattaaaagattgcaccattttgaataaacaaacgttgctcatgtttttggcaccaacgtaaaatgtttttagcactggaagaaatagcacctttatcactaacgccattattagaaatgagatataattcaaaatgtggagtacaccataccattcccattatatgaattcttctattatttactgattgtagattgtcaatatcgccatacgaggatatattctttgacgttatcccgtcccactgaataaagttgattactgatcgactttgcaatttagacccatcctctgacgtaactgaattatgtaattccatataatatctttgtagttttatttgataatttagtaaatctatgccatcttccataaaatgaatatcatctttttgttgattgccaaggtatttttgattattttcactttcatcattacaagaaacggtattttcaataacatcttgatactttatgttgtattccataattggcataatatattgtgcattttttgttgatttaaatataaaatgatggattagaggagctggaatatccttaatactaaatcctgtacatgggttatcggaaataattattttggcaatgtgtgaatctttccccaacctagtcagaagtctgtctccaaataatttcagtttaaaaaatgcatctttttgggcactaagaagtaccattacgctcttattttttaatgataaagttttaatatagctgtaaagaaatccagaagaattaaattttggaaaacatatcggtatccacaactcacggtccatggtattaagatgaagatgacgtctaactagacaaaataataattgtatatcatgtgtatataatgtatgtccttgaggtcgtataaccgctgccatcttagtatcttcaccaattaataagaatccatataacaatgttcctctaggtataatatcacggttctcatgcaattcttgtaatatttctttatgaatcttattcctaattctcttttctattggattgctctgtaaagcattcaaaaaaatatctggataaaaattgttggataataaatgacatattgagtttagattttctatatcactctgagctaaaaaggttcctaaatcaaaattagacctattcctaaacagtctttccaagctttttgaagttaatgtagatatcaaatatgaatataaaaaataacattgatcctgtaatatcttaaatgactctcctagattagagtgtatcataataataatgtgttctttatttaaaaagacaaatttttgacctgtatttcgaaagtgtatcgttttaatctcggcttgttggttaacttggaaataattgactatagtgttgataattcctgctaatggaattatctttttgtcatctctgtgcatcgtaaaaattggctttccagcatcagatataataaaaaagtttttattaaacctggttaatctctgtttgttaactgaaagcaacgtctcagatttattaaatatattgggtaattcattactgaccactgatgggccacatcttcccattccgcatacagatggtgtataagagtaaaaactttctgataagaggtcagttaatatttcttgataggaattgtgctcattttgtgaaatagaatttgaggttgtaaactcaattggtgctacttcattgatattcccattggaagtcttatttggcactcttgaagataaagattcatcaaaagaaatttcaatatctcttaaagatgagtatgatttagtcgattcaggcaacaaacgatgtgaagatgttgaagaaattgaattgttatttatgatatcagatggagctgttatggacaaatctgttgttcctctactattatttaaggcaatggatacagtaggggtagccttactaatactattaaaacctggtataaatcttatagtacctgatttattggtcgtgttgttattaaaagttttatgttcgtcactatttgatatattaaccataattcaatatagtcatttttctgatgtatttagaaattaagagaattcaaatcttacttgttattcggttatttaacatacatataattatttggttagcatttttttatgtaaaagtattttttaaagaatagatgattaagtaattttgacaaaaataaaatatcttaaaaatttgtgctaatgaaaatgaaaattaaagaaacatgaatcagataacatattaattattataactgttatgggcaaatcttgaaagattataaaatctattaagctgttaatgtaataatatataaatgttaagatgttgtgataaatatattgcatgattaccccttttataaaattacatattataaagagcattaggacagttagatcatatgtgcaatacccttaaaaataataaataaataataaaagaaaaagaaaaagacaaagatatacattaacaacgatccaaaataaactcccatttattctattcctgtaacatactccatgccattacctttactgtttttgcatgatttgtggaattttcttttacagtattttctttatggctcattagcactatgaagatgtaaataatcaataatatccatataaataatttatataaacatttatattagtttgatctttatataatcaggtcaattaaataaactgacttcaatttagatatattaataatgaatagggtattcctgaaaatctagtattaatttagaggtatgaaagtaaaaacttttaaagaattctccccttaggaatgattgtttaattgtgttctcaatatattcctgttattattcacgcatttcctttataattttaacgtaaactaacaaaaccccattatatgacggacggagttaatattattttcatatcttactgtttcgagacgttttttttaaaattcaataacaaagatgatatatacattattttcacttcatgtagtaaaaatctttatagcatgtacttatcatgatatattttatcttttttctcttaccctaaagtgatctagcatatctctgatcaatcactcttcttaattttatttagaaaaacattctgtctgcttcataaaatatatatatatgcacaagtgtcataatagtgaattataattacgaactatgatatggcttttaaattaataaaaaagaatcacgtagaaaattcgcaatatataaccatagatttttatgtaataataatttaaatagaaacaaattatcgaaaaaaaaaataaacaattaagagtttaatattaactacttctttccctttactcttaaaatttgctctgtcatttcacaaatggtatctctaaaactcttaaagtgaaatcccaaaagatgacatgtctcagaattatctactgttgctccaaaattataatgttgagcaccagtattaggtgttccaacaggtatcttcccctttaaaattggaaactccgcatttaatacatcaagaatatcttgtgtagaaaaccttccagctgacattaataatcgtttccctattaacttgtctttttgaaatgccaatatatgggcctttgaaacatctgaaacattaataaagcagccatatgtttcagatagatccaactttgaattaggttttgcatgaataagtttattaactatttcacaggaagtattcaatttttcagtcacatcttcatcaaacatctgaggacctaatacatatccaggattgatagttgtgacttttagttcagtcttattcttgtgttcgttgaaaaatcgccaaacttctctttctgctaaaactttagaaccattataggctctacttacacattcttgtgctttttcccaatcatcagaattccatgagttttctgtataaatttgaccttgaactcgctctgtttcaaagtccattatagcagcataacttgatgtatgtacaagtcttttaacagtacccataccatatttttcaatagctcgtaataatgatttagttccatttagagaaggtatgagtaattctgttctaaaatcagtcgcctctaaattatatggtgaggcggtatgcaacacgtaacgtatactactgccatacaattgaaatacttgatcgaaagcatttattttggaaatatcttctacaatttcaagagtcagatttgtcgtattcccgaattgcttgaaaagtttttcacgttcctcctgtgatcttacggtgccaataatttggtaatttagttttaataaatcatgtagaatatgtttagcaataaaaccaaaacaacctgaaactaacacagacatactactttatatattgtcttttttttttgaaaagaagctctcaaaaatgtaaagaaggaatgtgattttaacatcagaatataaatggagcaacctttaacatactaccttttttatattctaaaagatcttatgagcttataaatataaaacatcttttccatttttttttctttttgccttattattacatgaatttataagggaaagaattcactttcttaagttgtaccttttattcaaaagtaataacatgaagtaagcccctaaatcactaataacttacctgtaatttaatatcaaaataacattaattaattacctttgttttgtaataatagcaaaaaaaataggttacctgtttttcgtatttatataattggaaagtttttccatagaatatctagtataaattaagaataatgtttaataagatataattaagtttatgtctccaaaatagggatgtcatttgtgttaaagatgatttacttgtaacgcctttccttattatttagaattatgatacctaagaataaatatcgaagataacatatgaccattaaattaaccctggtttaatagctaccagcataatacatagataaattagaataataaaattttgtatttatagtgtttatagtacatctaaactttatactgtaaatcactagaacaaatcaataacacagaaaaatgttatcaatggaaattcttaaaatttatagataacggcgagtttccattatatgctggagcaaaagaaaattacatttgacattactctcaaagaaataggaatatatgctgttttacagaaagtgttaaaatcctcaaaggtttctaatcataaaaaaattcatcattaactaatccaaatagatagtaattcctggaatttgatttatgtttttgaactgtattagctcatactattagaccactaatacctgtctggttacaaggctggtaccttgaatgtattttaattcgtctcagtttatataagatgaaaattgtaattttattaaatatttcttttgtcataaccagaaagaaaaaaacaactgtagtacactttagtaaatcaaatatttatatttaattcaaacattcgtagaccatgttataatctaacagaaacttttagggaatgttgtaactcatatgatcctgagatatactttttttatttatctttagtcaatatgtgttatggtagtacatttaaataattttctataatataaataaactctgaatagttatccatgaaatattaagaagttcaatatgctagaataaatgtcatgtacatatacggatactgtaatatataatattggctattttgtcatgtttttaaaaaatgaaaacataataaacaaaaaatcataattaaaatgattatatcatatgatcatccgtaaaaaagttattacttattgtaatgaaatacaataaatttctccaagtgtctacaactatttgaatatttatcaaataagtgctataacaattacataattattgtaatattcgctgttatcatttagttttgttagttgttcaaaaaatgagaaaaggactgatttcttatattctattattccaaaattttggtttttgacaaaaaaaaaagaaaaagaaaaaaaaacaaaataaatggaatttcaaaatgaaaagaattagagttattcaagttcttttgttatttctttttaagtagtctgtttataaagagctttaactttatactttattattttacacttattagttatggaggaaactctactgtcatgatccttctgtttacacacatgagataaaatttatattactttttatttaatattaacaataaataagttgtattttaaaatttagtagtgtgtcaaaattaaagatatgttactatttagcttatctgagcatcttacaaaatttcaaacatgcgataaatctgcatttccagaagtggaaaatccatctcgtttgcttaactacgttattgacagtttagctatttcaccagatcaaattacagaagaggacacatttgatgctctattaggtttgtgtcaaagttttaaacatctacctataaaattacagacccaattgacgtatttagttgcttcatcattgaattcttgtgcaaaagacatcaaagctaatattcaacctgatatagactataatgaactaattgatttgatacctagatggaagtctcatttagaaatttattcatacctagtacacgtcctgctatttttccaacaagagagcatacgtggtatactttcacagaaatcagttaataaaaagggaagaaaagaaagttgtcttcatgctaatgtagatgtttttcgaaagattattaaccaagtagaatccttatgtgaatcaattataagtgtattgaatttagatttagctatgatttttcaaacaactccagaaagggatttatttgttatgatgtttacacgacctttgcactcattaatggatattgaagcaacagtgaagatagcgtctttaaaaacaattattcaacgaattatatgtctttcagtgaaaaatcatggacaatcgctaaatgtccaaacatttattatatctgatttaacttattttttacatctatctaacttcaatgcagaactactcacgctattaaatgatgagtttaatttttctcaattaactgaagatgttttaaaggaaattggtagtcgaaaattcaatatcagagatactacaggtcctaaatcagcatctacttttttagttaaattatcagaactatcacctctaataatgctacggcaaatgtcacagttaataactttattgaacagtagtgttgtaacacttagatcggcccttgtggaatcatgcggtaatatccttgttagtttgatattagatatatcagatgatgtttcgcaaagaccaggtgtatctcatcaacaaattgatacattaatcgagcttttagaagaaagattttgtgatgcaaatccttatgtaagaacgaaggctatacagggttgtcttaaagtaattagtctaccaaaaacaataaattcaagattcaaaacagaatttacaaaattagcagttagatcgttatcagacaaatcatcattggttaggagaaatgctatcaaactactttcaaaattactattaaaacatccttttactggagtacatggtgaccagttgaaattaacagattggttagaatatttaaaagctgtaaagaagaaggtccaagaaaatgaaaaaagttctgttctacctaataatataaatgctgatgattctatatcagatgttgaaaattctattactgacatgcattcaggtttggatttggggaaccctacacaaactattaaattgaagctgttagaaaaatactataatgatgctgttgaatttattgaacaaattcataaggcaattaatttggtatctgctttattattttcaaaaaatagaaacgagatattagaagctatggattttttggttttaacagaggcatttagtctggaacctagcatgaaagcaatcaaaaagatgctacatcttgtttgggtaaaaggtaccaacgatgaaggtacgagtatcacaacccatttacttgactgttacaagcagctttttttttcagtgccagataacctaacggcgattaatgcttctaagtacattgcagataatttaattgatattactattggctcttctctttccgatctgacttctttggaaaaacttttatgttcaatgtacaaggaaggtatgattactggtgaaattattaacgtattatgggatatttataaatatccactaacatatgaggattataacacgtccattatgctgaaaaataagattcatggttccattataattcttggtatgttagcattggaagataactcaataataagtaaagggctaccttatttacaaagagttggtttagattctattggtgaattggatttaacactttgtaagtacacatgtattgcattgcaaagaattgcttcgaagagtgaagatttagctgttgataaggtacaagaggaaatcatagtaaaaaaaatatattccaaaattatcaagtataccactaatcctcaattttatccgatgtgtgaacaggctattgctgcactatttgtagtctcttcacaacccgattttgtggtatctagtttaatcaaagaaaagacgatgatgacatttgggaatccagaagaacctagtgaattgtcgtcatcaaaagatatatctaggataacatccctaagtcaactactatttatagttggacaagttgctgtaaaaacactggtatatatagagaagtgtgaaggtcaatttaaaaaaagaaaactttctgctgaaaatacgaatagaaatgatggtcaagaaagctttgatcctgaagaaactaaatattctaccgacaagacgaaaacagatgagctcgctatgattggtgggaccaatgaggatgatttttgcgatgctattcagtttataaaggaagaagaattattatttggtagcaattctttacttgggcagttttgtcctcttgttgagtcaatagtctcgaactctttaaggtttaatgacacaatgcttcaaagaacggcatgtttatgtttagaaaaattgatgtgtatttcttctaaatattgtgagaaggcattgccattattaattactgttatggaaaaatcgccagatcctgttgtaagatcaaatgcaattttgggtttaggtgatatggcggtttgtttcaatagtttggtggatgaaaatacagactacttgtatcgtagattgcatgatagtgatattatggtccaaagaacatgtttaatgactattacatttttaattttggctggacaagttaaagtcaagggtcagttaggtgaaatggcaaaatgtttagaaaattcggatcacactataagtaacatgtgtcgattatttttcactgaactagctgcgaaagataatgctatctataatggctttattgatattttcagtaacttatcatctgataaggcattagaaagggataattttaaaaaaattatgaaatttctaatctcatttattgataaggaaaggcatcagaagcaattaagtgaaaagttatttgcaagattgacgagttgtacaagtcaggaacaatgggatgatatagcatttgtattaaactgtattccatattcagatgagactataaatgcaagattgaaagaggggttcaaattggtaaaagtcaattaggtgacaggcaaatgataatatgataaaacatattttatagagaattcacactgctgcagtttcgcttatgaatacagatgatataccatatatattatgcacaagataaatgtgagcataacagtaatatatattgatatgactggtcctgtatctgattcattataataatactatgtattgtatttgtgtaatagaggatttgaagcctgattcctataactacttgaagtgaccttttatttggaatatccaaaaagtagactttctatttcttctttaaaaaagtgtgaacaagaatttgaagaggctttataaatcggtaacaaggacataatagtattatgaaatagtaaacctattatagtattcatctaaattgcacttacatatagtctagaaggaattcttgaaacccatttgcttttgttttctctcggtaaaatattccgaaacggaattattttcggaagaggaaggcatgttctttaaacttttttaacaaacttttacaaatagtcaaacacgtggaggtatgcaaaaagaaaaaattttggtaagaagagtaaaaggataaagaagaggactacattaacttgttgtgtattcttactttgatactgacatttaacgaccccatatcattgttacgtctttaaatttttggaagtaactcacatagtcataatccatagtctttttatttaccaaactcagtcaagaatgactaaattttgaattattgattagttttgacataataaaaggatcatttgttatatatatactacctgcatcatatcagtaagaataagaaagattgtaactatacaaatttatctataattaggagcagtcactggattttccatccagcactcgaaatgcggaatgttagtagtggtttagatgttcaagaacaaactgccgcaagcataccaacagttgtgttaccaaccgatttttctaaatgtccgcgtactgatttaattgcattgatttctcgaatgctggtctttttgatacatatcaatgagaagaacaaaaaaagtaatagtaaaaatcaaagtcatgaggtaaagttaacccgttttcattctagtgccccaccttcaatatcagtttataattatttattacgattagctaaatattcttcaattgaacaatgtgtttttttgacttcgctttattatattgatttattgtccagcgtttataaggattttacattagactctttaacagttcatcggtttctattaacaagcacaacagtagcaagtaaggggctttgtgatacattttgtacaaatgcgcattatgctaaagttggtggagttcaatgcagtgaattaaatctattggaaagggaatttcttcgaagaattaactatcggatattgccaagagatgataatatcacattgtgcaaatatgaatcacatctaggaaaagttgttattactgataaaatagaatatgaatatgtccttaaaaataccaagaatcatgaaaattcaggttataacgttttaaatacatattatagaaagataattcaacttgtagggaaatttagtttggctacagatatatcaagaagggcaaattttgtgctagaagatactctctctcatatagtacaaaatgataacaacggtaaaaaaagatcttttgaagccattcaggcttcgttacatggtgatctaggtttgtcagcaagctataccttgcaaggtaacacttttcataattattctgatgaaaagaaggctttaaaaaagcaaaagtaatagtagaattggttttcaacaactttttttagaataaaaagtcatgaaattatctacttttctgttaacatatctaatatattgtagataatattttaaatcacagaatgttgtagaataaattagtcttgagctagcatatcttcagatgttggtccaacaataagtatatatttgttgtatgtgattaatagtaccattagtaattttatttatatgtgttcacaattaattatcacttaaatttaaataagatacattgcattattcagaaaattgcggtgttgttgtatggttatttttgttttagctttattcaagttgaaaagacattttgtaattttattgtggaaaaggtcttgtgagtttacttaatatatatatataatatgtttataaaaactttctatgattccctcaagttgatgtatgataataagtacaaacatggaatcaagtttttttggaattaaattttgtgtctattgatttgaaagctacgtttgttgtattgtatgtaattcacacttttctactttttcataaaaaagtaaaaaagatacttgaggatccttaagatttgaatattttagatatatatatataatgcagcattatggaaattatcattgaatttagaagtcaacctaaattactacagattataaattttaattataatgctttcaagtttgttcatattttaaaaaacttactaatatgattataatggatttttctttctgttgtcatgactgtatttctttgaagtcctaatttcaatttaatactgagttgaaggattggatttgatgggcaggaagctattttatatttaaaaaaaattattaggaatatttggtagaattataggataaatattactcaagtctttcctaaacgtgatctgatatatgtacatataatacattattctagtttttaagatcgtgtaattgagtgtcctatggtatattttaactaatgttatatactttacttattggaagttatgcttttctatatttttggtgaaaaactttgctaaggagtggttaactacataacaggacttttatagtgggtttgaaagggaaactcctatagctatattagaataattaacctgaaaagcagattcgtttattttacttaagttcttttggctttgttctttcggttatattttttttataatgattttctttatatctatgatcaattgataacaaatttatcttactaatttttaatattactaacagcatatatactaatatacaacatatactaacattaaattattttattatttttttcctttaacaaactttattatgaaaatcaatagaagcgggtaaagttccaaatataaatttattacaaaataaattaacaaaactgtatatttccatgatattcactattaacaagaaaatgcaggctctctatatgatgtatttctgtcatacctgctaaaaagacctcctacatgatccatccttaaaaatcattaattttcgatttcatacattcatctgtcccaaaatctcactaatttcaataatcaccgattctatacgatacacctatatcacgtgatatacgtcttcaaactatttacctttttttttatacaacacgaacaacattatgtttataatccgccctactatccatgtttccttttctcgtctaccatgatatggcgaaatttttatgagaacatagtaatgtacgacatatatgtgagtaaccctaatgagggtttgggatttaaaaatcttacagaaaaattgtttatttttattttattttactttttccccatttgaaagaaaagagatattttaatatgaaagtaagcaaagtaggtaaggttgagttatttatacaccagtgcacaattgtgatttagtatggaacatatatgtaaatagtgaggtttagatgaagagagatatataatagaaacgatattttattagcaaattggcaattggggatttcggagggcaacatttcccccctccccctttcaccggatcattcagctactaggcagttaggaagcagtgataactaagataccacagtcctatgacttttgtccatcctagcaacagacatgttgttcctttagataatatacacataaactatatagaaggatagctataaagaatattacagcacccagaaagaaaaaacctggatatcgggtactaaaggtacagatgataattgcaattaatcatgatgaaatcaagatgcacgcccggagttgagtgagtcgaatagtacccgcaacaagcaatcaaaaaataaatatgaccaacgtttatagaacgcaaagatggaacaaactaaataaaagaaagtacaaaaaacataaaacattacagggaagtcacaggaataggatatcgagaacgtcgtaacccagtagaatttgttgataatttacacaattttgatgacaatgcataaaagaagagcagagttgtgtgaaaacagccccaatacgaaaaaagatttacgttcctacgactgtttgcctaagatgatcattaccctcaccaccattggtagaatcaggagccttgaacagagccctgtagagaacaagtccacttcccagaagtatcgaatccttaaacagttgagatggatcaacatgagatactcgggccagccatcaaaacactacatctatttacaaaaaaaataagttagaaaagaacggtattaagatagagcattcctttgatttaggagctcttgtatatacaatgggtatcacacaaagtaaaaagatcatgaggcgaggaggaaacatacattaggtaaacgaactggacaaaagttggagggtaggaaaaaaaaagagcgctctttattttttttttctttgtatgtttcttagttaagatgagaaaaagacactaaagcaatcacacgatagcgaattaaggttctaggttaatatacaatggacaatggacaacacattagaaaatggatgtattgttagtgggattaggaaagaggaataagagacataaaaaagtagcgaaaagaaaattgctagatgataataatacagaaaaagtgaggttaataatgagattgaaaaagtaaaatagcgttaataatgtggagtagccataatggatggaagtagaaaatttggattgaattactgaggtgtgagagatacttttttttagcgggctatatttttttttctttttttttattttcatttttgttataactgttttttattataacatttttttttttttattttattttagcagtgcactatttagataaactgggactagagaattaataatatgagagatatagaagaaaaaaaatagagatgaaaaaaaaatcaaaataaaaagtagagatggaggaggggatggtaaatgaaaagagagagaattggaaacgatttaggatgttgttcattgactaaccaaccaatcattcagatatacattatagcataagtatgcctcttagatcatgaagcataaaaaaaaaatactacgagatataattgacttttgttatgccacccagaggaacagaaccaccagttccattaagatgtgcaaattataagccctaggagtatcttcaacttgttcaatattttattacgaataataaaataaattttgatcaggtaggaatagaaccaccagttccatctgacaaagagagccgcgagtcaaacaagaatccaatattcctatgtcaattattatctctgaaaaattgtccattaaaaatctcaaacaccattttcctatttcttggcttgtaaattcaactacaactgtaaaatctgaaatcatgtaaaaaaaaagcgcctctgtaaaactatcaccttatgagtaatagtggaatcaagaactaaattcaactaataaaaaatatcttcctcaaatcctaaatttgggttaacaatagtcttgaacttgcataatggcaatccacagatcctattgtattcactctcttggaatagtaatggaattgaataaaattaaacaataaaagggtaaaaaaatctccgaaaattctctagtaataaaatatataaaaagtctgcacttgctagtatcattctcacttgttggttgcatatatgtcacagcatatatatatatatatatgacctatattgtcagtattcattatatcaggataataagggcttgtatccacccatctacaaaacatttttgccatgactgctattgagtattagtattaatattattatcgtatgtctgttagtattgtaaagtaatgtgtcctaatcccttgggagatattcactcatcttaacggatctttttaccacatgtggtaacaccactggatatacaagaactactatgccattagaatacgctatcctaacacagtccctccaacttagtttttctgtaaatagacgggtccctttggttgaattcctagcactcacatgaaccacccactctcgttgattctttcatgtaagaaatggaatcctctataaggtcactgtcaacgtttctaattctcctagactggatttttgggtatgtctcttagctacaggtcgtagcccaccactttttttagtataaaggagaacaattgttcttttaacatttccactatcagcttcacagatcaagctatgtattattatctccattatttcattattttagaatcaaactgagaaattcttttttttcaatctttttctttgtgatcattctgacatgttatatattttcaaaattaatttactttttcccttccacttttgttttctaatagatgttggacatgttcacttattggttgggtgtgacaggagctattggactggtttctttgtaccttttggaagaaaatgtgtatagagtaaacacctattcctttaaatattattttgtgtctctttcttttttttaaaaataaaaaaaattaatgtcagtgttttcccgtaatattgaagaagtgacacaaaatggagtgctcaacgacaaaataatgatttttgcttttattgcattttaaaaagaaaagacacagaatcagggagggtaaaaaagaagaatgggaaatgtggtttgtaaccgtattacttttaaaaaacacatattgttttttattatgccagagaaaacagtaatgatagcagcaattttgcgacaaagataagagaaatttgggattgaagagtttgtttttgtctacagctataagagtttacaccattaagaaaagcttgctataaagttactttattcttctttttttttttcttttttcttttaagaatcttaacaagctattttggatagaacaaaagttattacgtttgttattccatcctgtatgattagttgacttttaaatgtttaattagttatatgtagagtctactgtaattgtacccttaagttgttatgtggttctcagtaatttgaacaaatgatttttttaaggcttctagccagtatttttagatttgtttttgaatgttgattttgaatagggcaaaattttgtgtctaaaattagaaaacagacattgcactttaagctattaatcaaataaaacacatgaatgaaccccttccattttgggaattatgtaaacaaagggaacaaaataaaaagtggttacaataaaggaaaagttactatttctgttcatttttgttcactttaaaaagatattactcggcggctaattttactagttacaagatgcaagataaatctgcttccagttttgataatccctaaatcatattattgtttgtgtttagttttagtcttacctatacctatatatatttatatatataatccaactaagagtaaacaaacatcggctttccaaataagacctcacatcttgaaaagtattttattttctttaatcttgacctttattttctttaatcttgaccttaattttctttttcctttcattgtaatatcggtatatttacatacatcttactcttacatattattataatactcaaggttttatttctaactatattcgaactgactgacaatttatcacaccaagtccacattaattattttatagaataataaatccgactgtcatcaaaagtttctgtttaaatgtgaagatacgtctgactctagtcaaaataagcttgttcaaatagcataccaaatactttagacataatgatatggcgaaatttttatgagaacatagtaatgtacgacatatatgtgagtaaccctaatgagggtttgggatttaaaaatcttacagaaaaattgtttatttttattttattttactttttccccatttgaaagaaaagagatattttaatatgaaagtaagcaaagtaggtaaggttgagttatttatacaccagtgcacaattgtgatttagtatggaacatatatgtaaatagtgaggtttagatgaagagagatatataatagaaacgatattttattagcaaattggcaattggggatttcggagggcaacatttcccccctcttttattgagagcatgtagtatattgcaagatagaaataatctgagaataattcttgtatgtaataaaggaaattgttattgtcattagtatattacaagatgttcttgcttgtttttttcagaaaattttagatgttttcagaaataaatatgaaataatcaagcaatagcgttttttgttaaaagtctaaaatagttttttttctccacttttttaaaaaagtatcacatagaagttaaatcttttgagctaagtttaagtctctttactttccctacttaaccgatatgcaaaaggtatagaattatcaataaatagcacttatattggttacaacatttataatttcaaaagtatactcacctacaatggtagatattaagtatataaccgatgaaattttaaatttctacgaaaacaaattccaaactaattacagaatttgtgtactcattgttggacctcctggctctggcaagtcaacaattgccaataagttaagagataacattaataaaaaatattctcaaactgaaaaagaacatgctttatctttacatacacaaccaaaaaaagatagcagaaagacacagtctgtactcaattatatgctcgaaggtatggaagaggcgagtgatgacttgaaacaaactttgaatgaaaacaaaggcatatttccatttctagttgaagattacagttttaaacctaaaaaaatcactagtgttaacaatactatggtgcttggaagaggtggcactccaaacgcaatgaaattgattctttcaccatcggaggagacatgtaaaaaactgcaaaagtttgctgaagttattccaatggatggttttcatttatcacgccactgtcttgatcaagtcgcagatcctgttcaagcctataaaagacgtgggtccccccaaacatttgacagtaataactttttgcaattaatcaaaattataaagaaaacaatgacattaagaccaaacaatgtcaaagagaaccttaatatatttgaaaaagccattcaatcttcaagagaggatattcccagtatttatatccctggatttgatcattctttaaaagatcccactcaaaatgcatattgtatctctaattcaaccagaataatcattttagaaggattatatttatttcataaagatgaaaattggaagtctatatatcctatattaaaagagtctgatgctattatatcttattacatagatattgatcttaacgtaacggaactaagagttgctaaaagacatttagagagtggacttgttaatacagttgaagaagggaaggaaaagttttgtgccaatgatcgtctaaatgcacttttagtcgaaaaaagcaaagaaggtattgaaaatctcaaaattattcgtaatgactaaaaatatatatatttatatcacttcttgtaccttaatagttattgaaagattttttatgtcactttttccaacaatagagtaccaaatcttctgaaatctatatattggaaggagaaatttattttaaatatgttgtcaaagaatacaataatgaaacttatgaattatttatttcataaataggtattaaagagaagatgattttggattcattgatgatccaaattttaataatacatttgtttttatgccatctattattttgcatttcttcaatatattgacaataatactatcatataatctttcaagaccgggtttcctctgggttttcacgaaagaggagaatcatctcctaagattgcaataattattttatacaatgaaataatatcaaataccatttgcaaatttttgatgtttgccatgtatccttcaaattctaaatcttcatattttgtatgaacgttttggaactgatgccttgtatcatttaatacatctttttggtgatgtatgaagtcatttcttaaaaaatcaataaccgaagatagatcatcttcattctgtttcaatatatttacagaatgggatgtaaattttctctgttgtaacagtaactcattcaacagtgtattttgattttcaagataacctttataatttgaatctttaatttcatcaactaatcctttttggagactatctaattttcgatttaaaaaacaatcaaataaagctatatcattacgtatattttcttgggttttctttggatctctattaataattgaagacaatatatccacgtttactaaaatggaatcctttttggcttgatttagttcaatttgctgtttaagttcatttattacattatacaaatatttcagattctcattctgctgacccatgtataacttgctttgattagatgacatacttcagaattgtattagtaaattttaagcacctaaaaaaatttattattcgaataaaataattgaataccttaagtcctttcacatttcttcgtaaatattattaccaccataagaaaatatctaactatttgtcttgatatgctttaaaccagcaaaaccatttttcttttttcttgaatcaactctctttattttcgagataggtagtacctatttatatgccttaactattttcttcatcacaatgtacgaaatgacttattgatactaattgtagtcatcatcaaagaataatcttttacagctttcctataagataacctgttgaagcttcaataaactttagcagccaagcatgattgtaaggaaataactaagatttatagtactctaaaacaaaaaaaagcaaacaatacatagaaatctaaatgcatattataaaagttttctagaaatttgtgattatcttcaatagtaagaagcatacctttccctattggacaaattatatcaccaaacaactttaatgcaataaagtcgtatatatatttatttatgttacacaatgaatgatgtacggtcatttatacaatataaaatttttatgatttaataatgaaatcgagtctggattactcagctgcatgactaatttttagaataagatttcgccatattttgtggcagaaagaaaaaaaaagagaatagtaaaaagaacaaagaacaaaggacatagaaacaaaaaattctgtggtgtgtgaacttattataaaagcaatctacatactactacaaaggagtcgaaagaactaaggcgctgagtactcgatagtctctgagaaatcaataaactctctaaacaggattataaacttttgagaatatatgtgtttatacatttcagagtaattacaactaacatattggaaaggtgtcaataatttagttgtggcacccaatttcatagaggcttaatactttttagtattcttttttatttttacttttattttattttttcgaaagttttgaactttgacaaaattatatgaatcctattaaaatcatatatttatatctcgtaacctaggataagaaacagaggctaatatcttaatcgcatcaataaattaaataaatctactactaagaatttgagattaataagatataatggacaatacacacaaatcaactacaaaagttatcaaaagaagaaaagttagcaaggcatgtgctaattgcagacgaaggaaaattaaatgcactggaactaatccatgtacaaattgtgcagcgtacaagtgtccatgtgaatacatagataaacctaaacaatttcctgaatccaaatctaataatacaaaaaataataccgataataattctactccttcgcctctttatcctactactattactactgtaaatagaacacctactactactattagtaacgatagtagtaatagtaatgataatattattagtaaaactgtatctgtacagagtatagctgaaagcaaaacaagtgtttcatctttattgagtcatgatatccaagatgaggctcccttaccccaattccgaaaacagatatcccaattacacaatattaattccaatttagctccatcactaccattatatcaagacacaagcttgaatagtagtaactcaaggattgagatgaatatatcaccgcaattgcaaaagctacaaaatggattatccaatgattcatcgtcctcaaagaacaaacatgataataatgatgatactgtaacaaaaaaaagaaaaaataaaaaaccaaaaaaagttttaaatataaatgaaccactttttgaagataatggattatattttgatgacttggaaagtcaaccagaatatatatccttagttgaagctatcagccagatggagtctatcaataatcctaatgatgttctcaaaaaaattatcaaagagactaaggaaaaactagacacattcatacttagttggaaacctagcattgattttaataagttagaccaatttaaggattctaaatctgttgaaactaagttaatgaagaacaaatatagaaatataatatatcttggcgaatttgcttcattaaatacacttggaaactttaacataaaagttgtgtccaataaaatgtcaaatcatactactgataaaccaggaaaatctgctgatgagcaaccatcgaatctagaaaatgtaaataatgtggtaattttacaacaacaaagttttcttcaacacttaccccttgtagatgaactttttggaatgtattcacccgtggatgcattatctctccgtggtgtaggttcattagtccaacaatatgcaactgttaagaataaggatacacaagctaagatgaaggccactgtatacattttgttacgattttatgatatgtgttgtttacatcttaatgaagttgtaatttctgttgctaatcctctaggaaattatttagaaagaaattgtagaaattcttataactcaaccattaatcacagtagaaaagatctggttcacatgataataaataaatttccacaaccttttaccgaagtggttacaggtgtatcaaatgaagatttattaaaacttttggaccatgatttggatatgtttagaactgtactgaagatgtatgaattgtataggattgaatttgaaaaaatgaccatgaagattgtatctaaaaattcgaatttagctctagccaaaataggagcttatctggatcagttaataaatttttgtgaattacaagatcttctagtgaccctttgttactcatattacaatgccacattataccatctagatgaatataattcactggactacatagaactattgttaatgtttttagataatcaatttgaaattgaacatgactatgggtatgaaaagattttatctgtggcattagattctgcccataaaattggtttacatcgctgggagtattatgttaatcttgatgaagctttagctgaaagaaggcgtgttgcgtggtggaaattatacgaacacgaaaaaatgttttcaatgaaacgtggttttatgtcaggaattaatgatgataaagtaaactgcttattaccagaacctatgcgacatgtgggatttgtagaccatgctgattttttatcaagaatgctaacatttgaacctgatggagagatatttaaaaacatgtcagtaaaagatttaaaaacttatggtaaatgtgccatgtctcaagtattaagtgacctgtatgttaaggtcatgtttagtgataagtatacttcaatcaaaaatgttgcattgccacaaagtattcgtgaaaagtatttgaatgaaatacatgaatattatgaatttaccaagaaacggttagaacgaattaaaaaacacacaataaagctttttgaaattgcagcaacacccagggttgatattaataatgctcttccatatgacgataagttcgaggcaaatgagtatgtggtattatattcgctatattctacattaattgtaaaatcttgttgctcactaactagtcgattgatgcataaaccaaaaacaaatattacaaagagtagattattacattatcataaggaaatacataaaatatttaatagaacatcaaagtttttaatggagttagaaatacgttacgagatgtggagattgtttgaattttattgcttcacttttgtacttgcatgtcatagtatgagtgataaatataatttcactacagaagatgatataattaatttattgaaaatttttaatagtgtgttggtattttcagaaggttttgatgaattatgtatggttaataagagtattagccaaagtcagactgtaaaaaagtacggtcgttctttttctttgatagcaattttgataagaatgttgttattacactatatggttaagaataatgttaaacttgccactttaaagaatagagtagaacatatattaaaatcaagaaatgaacccactgatattgtaacattaattgatgtctttatggatcatgattcatatgcgtttaaatttatactagcaccagttcaagaaaacggatttcatttgaatatgcaacaagtaataaatggtacgtatagtcataatttgaagaacaccgagtacataaattcaaaatttattaaacaaacaaattctattaaaaatgactcaagtatgaataaaggtagtaaccgacaagattctcaagttccaataaatgtatatccaccgtctgtattacatgattctgaggggaacaagatatcaatgagaaacaacccaactacattaaatgtatttaataatactaaaacatttgaaggctgttctccaaattcattgagtaattccaaagatttaccaaataatgtatcagccatatccatgaataatactacacttttaaatatggaaagaccactacagcaactaaataataatgttgataacgtaaaaaacaagaatgatataccgttgcatccacaacatgatattagccaggataataaccaccatgataataacaagagtacatatcccacggcaacaacaacaattaataacacatacagtcaggatgatattatgttttcaaaagtaccaattccatcttcacaaatatcaaagactaattctacagtaattgcagaacaagagaatcataataatatagcgacaaacaataatcaactattgatgcagccttcgttgaacagttcggcttacaattttggtacattagaagaatttgtgaacaacacggatcttaacgatttatacaaatccctctggaatgataactcagttgactttttataattaatgtgaaagtacttactagtacttcttaatgaagaaaacattttttttttattttttctagttcttttcttctgttgataaatgacccatttaaataaatattcacttggctttactgtgttatctttagtttattagcatgattatttttaaccttccttattttgataaagcacacacatacacaaaaaaaaaaaacaaagaaaataaagaagcgtctttgaatttttttctttattctacatttcgtatatcataaagaaagtcattataatagaaatcattacaagcaaatgcaggagaattattattctaagactggaaataacaagttgtcaaagaaatgctctttttttcccttaaataaagagcaatatcatatatcgttatgcgtttttgcctctcttgaaaactgaaataagacctatttcagcaaaataaaaaagtcgctttagttaaaaataatgaaatccatagaagtttctcgaagaacatctattgataaaaaaaacaaaaagaaaagcgagacaattttggaaaaaaaattgttttaatctaggatctaaatattttctatggtgaacaattacgacagtttgattattaaacttactttttttctcataagatagggttttgagtataattttgcaactcggcaaaaaaaaaagatccttcttcttgaagctttttatctaagtgatgagatagttgatttatatttttttgtctaactaagacgtaggttagtaaggatataccaactattttcttttcttttcttttttttttaaagataaaaatatgcgatgtatatctagtttataatatattattcattagaaggtatccaaagcaattttattttatttttatttttttttgtactaaaaacacaaactagggtacagtttttcaaattgcaaaataattcttctaaaggatacaaggcacaagggttgtatatagcgttttttcatcacaactttttttttttctatttacactgtatttgattttaaaatcccatttttttttagatcttattattgagcttcggattaagaaaaccaaactccactataagggggaaaaaaaaaaggaaaccccttgcacggcgctatcctctgcttagagaaaaaaaaacaaagaaacaatgacctaatattattttaaagtggggaaacctggtttcattatgaataactaacagtttaagcaatgcacaacaaaacataacacaaacacacaagcacacaccatttttcccctcctcccttttctataagccatttctctcctctcctgatctttctggctttagccccttgttcttctcagccactcacccccctcccttccctcttcctctcctgagtcttagtatcttgtgcatggtgcatttattaacaactagaaaacatatataagggtggagtttcgttgacctcataccatgtctcgccatcttaaactctcctcacgtctttattaggttttactaccgctttcaataagacttttccccattccagaaaagaccaaacaagtaattgtgtttattatacatattaatatattctatttcttactagaggaaaactagaaaaaaaatagaacaaataatcgaattttcgaacaagcattgcagtttaattattctttaatttataaatataaaactttactaaaaaaagatacaatggcaagaacaaataaatggactgttagagaagcacaagctgatccaaagtacttcactaagtcgggtaattttggcgaatctccaaataatgttaagaagggtggttctggtaagtctaattgggggactgcaggtgatgaaattaatgatctaattaattctggcgagattccaccagtgttcaataaacagagacgtggttccaacacccaaagaaacgaaaggagattatcagatgttcaaaatacacatgattagaaaatttatgtagcattgtaatattttttctattttgcattattattgcatttttttttaatattattttattagtgattgtatatgaactttcatttttttaatgattttaatgagatttataaaataaaaaatatcatattgtttttcattattgtttttattgttttttttgttgtcttctctgttttatgtatgcgtatattaggactattgcaatttaatattctttatctcttttattgttgacaattatattttttatcttcgtctcatttgaatctttttattgttgtgattttcattttgtaacttacctctattcatatgtttttgtaattacataagttacctttgttacataatcgacctaatattatttgtctatttaaatgtacttttaggttattaaaacatagggaacataataatttattctaacttaataattctacctgtctgatgggtacggcaaatctggtttcctttgacaatattgagcaccgaaaggactatcaacattgtgacgatcataatacacttgttgttgatttaatctttgctccctttgtaacgagattcgttgaggcatcggtaatcgtagctgtttttgtgacaaagaattgttattcgatctatactggacttttggtggtactgtaggaacatttatatatgactgctttttattcctattagtactgttatgctcatcacccaagttttccatttcaaaagggttgatctttttattattatcatcagaataattgtttctattattatattggtaaccacggttactttcataattatttgtttttctagtttgatatagttgtttctgttgtctattctgtatgggttgggtcattggcggtcgactattatccattccttggggtgtcgtctgattctgctccagggctctttgaacaatataattatacaccatagcagcattcctagtagaacaggcatgcaaccatgaaaataatgttcccagaattggaactaatgatatacaaagatctaccataatatttccatgcatctttgcctttaattctaatggtagcctaaatgatttatccgcttgagttataagtttattatgaattaagtacatgatactaggcccaataagaggcaataatgctaataatggtgcccagcctatagtatcggtccaacaacagtacccacacatagatctatcatgcatccaggccctattttgtatagatttccatgccttagattccttctttccaaaaaaaccctttggcaacttacgtctaatttcttttgtttcaccattaggtaactttatcttttcataaaatggatccttgacaggctggaaatgttcttctgcatattcatttgccttatctactaaataatcttgcccgaggccttcgacaatgcttagtattaaatttgacattcataaaaaaaaataaaaaaaaaaagaagaaaataacataaaatagtaacgggctattttgaactcaaaaggaacatcaaaagccagtggatacaaatatattattccatatatatctactcatccatcgcttgtctattaatcataagaccgatgctatcgataaatattttcattcatgtttttggacatcaagcttcagttgatgaaaatttccagatcagaccataaagtacacaaaattcaaagactgttatgacatccgtacagttttaagaatttttagctgaaaaagttaaatcgaaaataaaaaaaagcaaaaattatgaaaaaaaatggaaaaaaccacaaagtttaagaatttccttttttgtatgaaatacatacttttgttatataacgttatttaatttttctgcgtcttactgcaggatgtttctttttttttttttttttatttttttattttctttcttttttgaaattccaaaaatagtagtgcgacgtctgattttattcaatcctgcgaaatgttcaattaaggttactactattggaacaaagtgtgaataaacctcaatcttcatagaagatataacccatagaagaaatggctaaaggtgttttcaaggaaaagtattttaaacagatggatatattatgtagtattgtgttgtaatttctcaccccgcatttcccttcaactgcaagaagcgaaccgactccctcaataacgtgtaaagatggctagagaaattactgatattaagcaattccttgaattaaccagaagagctgacgttaaggtcgctaccatcaagattaacaagaagttaaacaagaacggtaagcaatttagacaaaccaaatttaaggtcagaggttccaagactttatacactttgattgtcaacgatgctggtaaggccaagaagttaattcaatctttaccaccaaccttagaaatcaacaagttataaatatagtataatattattactaaattttatggggttttcaattttttgtattccatatattactttaaataagataatattatatagtttataatttcatgtccatttacaaattttaaacttttgttttgctcttcttttactctctttatttttcatgtttttttatgatatgctccagaaaattgtatagataacaaaagttactaataaaagagattatcatttggagtatatattatattttgtatatatagctattatatttctcatatgagaatgcaatagacagatgttcctcatgtagagaatatcacatgtggccctaaaaagcgcctttttttttgtttattgatcatttatcattattgcgtttcaattgtaatagatttgaactgtcatgtgccataaaatctttgctattattcatagcatcattaaatttcatttcaatagaatcatagacgttgctaccagatatcatccgactgttccattttggtttacctttagaatcaagaatagtggcaccatcactacttgtagagtttctttctcttgaatcagtttcctgtctttttccctcattttgtctatcatcacaatccactttaattaattctgcggtacgtatccatcttcttcttcttgtatatttagtgaatgattcttcagtggaaggttttttccagtaattatcatagtataggtacccttgatttggagttggatctgctgtggttttcaacgtactgttaccaatatcgattgctccatcattggtcaaatccaaacgccatgttttatctaaccatctccatttcatcccagaaatattatccattggtggcaactggaatttatctggtggtgaagtctcattcaaaaattcgtccgtccaaggagtacgttcgtaattcaacatggtagatttccaaccgattccaatccagtgccgttgattttcatatagcacgtaagtgaattttataggtttattatcctctcctttataatccgatttgttaaatgcagagtacgtattaagtttatattccttgttacttgcctcatcctccaatgaaccgttttttgtaagtgacaattttttattaacttgtctttgtacatttgcaagcagagtttcattaagtccaaaggaagtatatatcccattagagttgtaaccattggaaacatctatacctccaaggtttaacccagtgatgtaatagattaatttccgtatgcatttgaacttccaaaataatcttcgtgtgacttttgcgcctggtgaatgatatgttaatacaaatacgcctaggattagtagacacctttttggtgggataatcaataaattaataatgattacgatgggtgagataagaaccatgaatagtaatagtcgttcaatattatccatatctaaatttgtcagtgggtataacaataagtcaaatttataagacacctgattcattatttgaactatatcttcaatagttgattgttcataaatcattttctcgataaattggtttagctttgcatatcccatcaataaagacacaataataatatgaccaaaaaattttgttatgaatgagagctgggatactgtgataatatatatgagcaccattaaaacactggaccatatgtttttattggaccaagttaaaatacccaaaatatgattagcaatgattaaataggggtataatttgaccaacgataaagaaattgcagaaggtgtattttccattagcggagaagttacaatgatattttcatcactttctttgtcttcaaggtgatcttgacttccaagggtattaatattcccattatcattaaaatcattatttttattatcacttttactactttcagtcgttaagttattattgccatcggagccttgtgatgaatcagagttatatttctgatgcattccacgaagaaacacagtagtagcatgacttcctaaacctgagggagaattatctagaaactcggcccttattacagtactactctttttcctgttagaatcgctcataattaaaacagaagattgacttttgctcacacacacacatatatatatatatatgtagtctatttggatttattctgtataaggtataactgtttaactatcctatctctttcttaaatgaactgtaatgaccaaatattgttcagacacaaagatcaaagggttagagcagtatctattctatgttttttttttgtgtgtgattaagtctttctttgttaaaaaaaaaaaaaaaaaaaaaaagagaaaaacttatttacttattattaaaaactgattcattattatttagaaacagattgtatgtatgtatgtgcatataaacataaacataaacatatataaatatagataatatattaataatatattgataatttgacttatgtttaagaaaagagctaaattgtccggtggagtagattctaaaagacgtaagttggtagaaccatcacaggtgaaaaaggcaaatgaaaatgataagagaaaaaatgatcaaaacgatgaacaaccaaatatgacaaataagtgtagggagactgatgcagttattacttctactactactacatatgtagattcagaaatttctaaaaagaaaaaagatgttgcacatgaatatctgggcctatctgaagctgaaaagcaggaggagactgcttcacaagatgagatacaagccactattaaaacatttttaaataaaccaaaattgacggggagtagtaaacaaatcaaacaggcgtccaatttgaaaagcacggtgttaatggactatcagccagatatctgtaaagattttaaacagacagggtattgtggatatggtgataactgcaagtttttgcattctcgtgacgatttcaagacgggttggaagttgaataaagactgggaggcgttccagcaacacaaccaacgggatgcaaaccttattgctgctgccaacactatcaggcctggtggtgatttacaaaaggtggtcgaggagacgattgagaagacaatcaaggacattccattcaaatgtgtcatatgtcgcaacgattacaagaaccccgttgtcacctcctgtgaacattacttctgtaacaagtgttttttccgaagaatcaaggacacaggcaacaaaaaatgtgtgatatgtggccacgacacaaagggcagtgcaaaagttgccgccaatctgcaacaaatattgaaattacaacaacaacaaaaggaagaaaaggaagaaaaaaaaggaaaaaaagaaaaaagggtagaatgatctttacaaaagaaaacaaaaaaaaaaaaaacagaagttgttgcctttgtttgttcacacaataacgtcatctccttcctccctttccctccccttcaaggtgctattttgctccaaaatcgtggttggtgttgatttctttgtttttcctttgaacaggacttgttctattgtctagctgcctaaacattcttgatgtatttatcaacaatgtcgaaatttccccttagccatgggctctctggaatataaaacattactacaacccgtaaattacacagtttttttttttcaacaatgccgatagtattgtaatataagagaaagaaagaaagagagagaaagaacaagcaaacaaagaatacgtacacgcatacacgggcacacttaacatgacagacattcttaattatgcctactgctagtcgctactacgcttttctgttctgtcagtgtggaatattataacagaattcttcagtttttttttttttgaagaaactcttggtcatatatatatatataataaaatttgttatttctttcctgcatcagtatgattatttttgtttttgagaaaaagatgtgtaaacaataactactccagtttttttttttttttttttttttttttttttcattcttttactttaaaacatctgatttgagtaacatccattcctaaaaatacatacatacatatatatatatatctacgtgtttatttttttgtttaactggagtttttttcaaccctcgaataatttgtttagtattggtccttgctgtaaactaaacaaaaaacaaaaccatatgagatcctcgaagaatgatacagtctcattactttagattaaaaaatacactctttaataaccatactgccaaaattaatagacttttgaaaattaaaaccgttggtgtggtgtgtattttcatattactctggttttgtatctctttactgaaaaataaaaatgagaattataagatatacaaagttgaaagattagcagatttgttaaaaattgatatcacttcagagatacaaaaacaaaaagaaactttatcatatatcaatgagtcagataaaaatatagatcgctatttgacaaaaaatatcacaggatatatatcaaatttagatattggaaagaatcatttccctccttcttctcttcttcctccagcttcctcccagtctgatccagacttatataacaacaataacgataaattcatgccaaaggatcaattatatgaaaaatttgtcacttgtaaagatttacaatatgacggtattttgcaatttcaagtcaataaacggaaaaataaagatgacttaatcggtgctcgaagacagattctctcttggcaaaacgaaatctctgacatggtacaaaataaagaagaagaaaaaaatatgtcagaggaacagattatagaaaaacactggtttgaattcggtcatatgtccgtttggtcagaaactgagaattgttatttaacatttagtagaatcatctatactcgaaattccaaaaattatcctagaatctcgttcatcagagctaccgcattcgataaagattggaacgaaatcaaagggaaaagagttccttattcagatgttaaaatacctcctgatttccaagaacaactcgagagattggataaacaattgggtgttgaccaatgcgaactacttaacaaaggaggttttgttgaagaataccatgaatgtttaaaaagacacaatgacaatattctaaagaataaaaaatataaaaaagatatattagataaatatttcctaacctatccaacagtactcaacttccacttcaagttaagatccgacttaagtggccccgaggatccacatgttattcttagaaaggaccattacggtagagatgaaccaatcgttatttttaatttggatgatggtgttgagagaaaaatgcattcaattcttccacatagacgtataccaactttggtcaaattcctattaccagattccaaaggcttgtctaagacagaaaagaattgggcaccatttttcattccacgtattgataattcatacagtgaattgtcccttggctatattcactttgtttatagttttatgccactacggatcctaaggtgttccttagataacggtcagtgtgaagaaagattttctgctgatacactgaaattgagtgagactaatgtgtggggtggtttaagaggcggtacacaatttgttcctttaccagaacctttacctggcgttagggggaaaaatgtttgggtttcgtttgcaaaaacacatactaagaactgtggttgtggcccagtattttatagagctgttcttgtggtcatgattgaagaaaatggcatttttcatttggaattgattactcctgggattgattttggaattgaaccaatggattttggaatggctgataaaaaatgtagagataaaaatgtcttggcgccaaattcaatagtctcttggtacatcaactctcaggatacttccacaggatcttttgaagattatttaactattaccgctagtgaagccgatgagataacaaagaggatcgtggttaaaggagtattgaactatattttaaatatttatacacaaaaacatatcaacggacatttcccagtagacgagcattcaaataccattattgataaaacaagacaatgtttgaaagaaagaatttcagatgtttgcaaaaattatggtttgactcattcaccttaatagtctcttaatgtaaaaaaagaaaatcgtttacatttgttaaaaagttatattttagaaatatgcttgaatcttacggtctattcaataaatttgagtatatatatttacttttcaagtggatataaaaatgaaaggctattaactattcattgacaaagcattttttttttaatctttaactaataagaaaaaagatagtgttattcttcagtgtataaaaattcatacgaaagttttttctagtgatgatttatattacaaatgacaaaaaaagacaaaaaaaaaaagagagttgttacagaattacatggtactttctctattcaattattacttctcaaatgacgttattgaatgttcatcattatgtatatattcccttgatgagtatgctttgtaaatattgtatttttcatgttttgagctgtgaagttttgtactaactatcgaaattatatattataaatctgttgtttattacataattgttaaaaagtttttcacttcggaattgttctgattactaaacaaaaaacataaaaagatattttctatcacaacttcatttccagtatatactcaacaacgatatactgtcttgtttttcatcgttacatatctatgtagaatgtcttgagaactatcaaacaaaacaatctaacctagtggcggacgtctatcaatgtcaactacctgataaaatgccaaaaacaaataataatatagttttaaagtgatcattattctatgaaattaccaacatttattcttcatgccatatcctctgtacatattgacatatatcagagagaaaatgaaagaatattattaagtgaattatatgtattttctatcgtgtcagaatctgtcaatgcatcatctgcatccaaattatctgcattagtactgtttattaaaatcgtatctaccttatcacacaaagttttaacatccacatcacttaattctattttagtttcagcggcaaaagaattatatgtactaaattgactcaacaaagaactttcatcaaatcccatacttatatctaccatatgtaaaaaaaattgtaaacttgttttcataaatgtagcgtatacgtatggcttctttgtccctgtatctttgaacccatatgtgataaatataaaatgtgccagacgaaacaactccagatattcattttcctttacctggtagaactttttaaagttaacttttaaaagtatagaaagaagaaaatttgaaatcttcattttatttttaaaaataattgtaggtgtaagagaatcacaatagttcccaactattgttgtgacaataagtctataaggatttaggttacacatttcatttgttgttgaaaataatgatatgatcttcttttcaattacatcatcaaaatttgcattcaaaatagactgctccataaaaataacttgatcaataatatcaggtagtgcattaatagctttcctaaaattattattctctatttcttgatttgaaatttggaaaacttttcttaaacgattaaactgagaaatgtcttgtaaataattaataaacttagaatccaaaaatactactatatcacggctacaattactttcgatcatcccgttaaaatacatttcagctaatttacgtgtaagtgaaataatcaaatcactatatttcagtctccccattacttcaaacaatctcttccaaaatggtgaataattaactatgttagtacccatattattgaagttgaccacattattttcactcttttgtaataacctcttacataacctccaaaaggatttatttttcattgaactgtcgatattgtcaacaacaactgaataaaactccttttcaagattcttaaaagatatattgtcacataactctaaaacctcacagttgaagtaaaatctgatttcaggactactttcaaggctatggaatgtaacaaattgccaccaatttaattcacccttcgcaattagacttcttccaactttacaataagcataaatccaatctactgataattgtgctttatttctcaccaacggaaacaaatttgcaaatatccactttgaatctgtgttctctaaattctccaaatatatatccaaaaacaaagaaaacaattctttatcaaccttattgtcatctgtggtaataccacacttgaataatgctttactaagtctattccatatatctttgtggttattgactacttgacgaattttagtcaaaaaacttatccataaaggttttttagaagaacaagacaatatcatatcttcatatatcattggaataatactatatttcatagcaacattttttttcacactatcaaggagaaagaaaataactgaatttaatatagcttcagatattctcatacgatcttgtaaatttaaatcattaacaaactttatttcaataagttgggtaatgaaaagctgaaacctgtttgcataattaagattagatatgtgtgccaacaaaacaagcagattaagacgattaatcaaagcagatggtgtatcattaatcgtcattctgctaattggtgttaatttttccagcataatattcgatatactcatataattgatcaaaaataaatattgattgaatacagttttacaagcatagaccatttctggattgatacaaactttgttaatctttgatgaggatccctcttcctcaaaatcgttaaaacgtctccctttgaaaatatcatgaagttttaaaataatagaagtttcgatatcccaatgcatgttataatgacaataagatatcaaggaaagggctttctttaacccattaaaatcattttcaatttttatggcagcccattgtggagtctttattggaaaaatattgcaaagtactcgaacaacatctggaccaaaacatttttcattaaaaatataccacagttgctttttcaatttcaattcatcaattattgtagctaaaatatcataactctgattcaaaagatcaatattttctttatttatcttttcataacagatagacaaagtagaaaataaagatacaacgtgattcaatattgtcctttttatcttctctttatatataagggcaatattcccatattttgtaacttccaaaagcatcaattgacaaacagctaatacataaaaatgtatggatcttgccttctgtcccagactattcaacttctctctgaagttcgcatgaaattcttctataacaacacgaatagaaggaatatttagttgccataaaaaattggtaagttgcttagataatgtgagcaaagattcttctgatgacccctcattgataatacaatcaaaaattgttttcatagtactttctatcttgtcactattaaaccttgagagagtataggttttattatttaacaagatgactatattatctggtggcactaagctagttttcttaaaaaatacatccaacacctccaaaggtgaattgtctactatactaactacttcatttaaaacattttctccttcatcagaccttctacctttgtgtgatttagatctaaactgacctgtcaaagcttctaccactgtattatatgttacaactttacgatttgcaaaatatttcttacttttatggtttttcttctcagtcttgttctctacgtctgattcattattttcttcttcctttaatatatcttgataagattttttattgtttaatataatcggtgatgatcttttgtaactttttatagagatacgttgtattatatttttttgtcccatttttgttatctttcccttccttttaacagatttccccttcattaggaaactcttcttagttactttatttttaattaaattttcctttcccctttcaattacatttaataatggattcaactcactacgattatcttccacaatcatcatatcatcatcagaggaaggatacaactcattaccaatcaaggatgattcctccaaatcatcaattgtataaatatcatttattgcaccagtatgagtgaaatcatccttatctatgtcatccctgccggtttcatctaattcatacttcaaagatgaatcagaaatataattatcatacttattatgataatatttatccaaatttattagacttagattttcaacttcattatcagtcggattctgatgataaacttcaaaattttttgtcacatcatcatgataattgttttcttcattggtatctactatcaactcctttagtaaagaaacgtcctggcctgtttgcgtaatgaccttcttcttctttgcaacacctttcccatcttttggtggtgaagtccttcttgaataggtagttcttttttcaactgtagaaagctgtctttcccacaacatcttaggcaaaacacctcggtatcctgtcttaatttttaatttctttcctctaaataaaatgtcaggttcaatagcttcatcagaagaagttattttatgaacattatcctcagtagagtcacaaaaatctttttgtaatgtaggtatttcttcatccaaatcatattgagtttcaatgttaatatcatcatcctctttttgtaaagaatgattactgtactccgaatacacatctgaatcatcttcatatatcttactatcataatcactggtattgtcattagtatatatatcatcattattaactacattgccgttaatctttgtatttataatatctgttttattaattttattctcaagaactgaaagatcaacctgattagatataatatcaaaggtagatacatcatatccttccaatagttgcctgtgtttaattctttctaaactatatggcattttttgaattgcagttctttttctaagcattcgtcttggtgcggtatcctccctctcgaatgtaatttgcctattaatcaaactagtacttgtattttgcccaataatatagtcatttgtaataggattttcttgactatcaatggtagtaacctggtttattacctctggactatctatctgattataagcctcatcattattatcagaattaatttgagtcaatgagaatttgctacttatcgatacctcttgattgccatctccatagatagttgtttctggactgctttcttgagaatctgaaataatatcatcattagattctcctcccatactattctggtatcccctcgtaaacccagcaacacaccagcaaccttatttaagtcacttctttgaaagcaaaatataaataaggttcttttatattataattttactatgaactgaataacactcctatttatcatacgagctgtccctttcttaagaatagatatttattttattacatataagctatatattaatcactatgttaagttttctctatcctacattcttcaataattctgttaattgtttttttttttacctaatgtcaataattcttcgaaaaaaataaagacttgaaattaaatgaaaaaaaaataatcaatagaacttaagagagagttaaagagctgacgtaaaatagttgaagcccagcttacaaactaggttaccttcccctttatgtatacatcaaatacataccaccaaaatttaaactgtaaaaaaagacacaaaaaaataatactttaaggagaagagttctgaaagcttttaagtacattctaaaaattattataaatattgtcatttctagttatcattaccttcatattatccaactaattacaatcatttttgagttaattcacagaagacatggccgaatcaaacgatcaacaatcacccaatgtttccacaaacatgtcaagaagatcatctagttcctctagaatgttcagtatcgagactacagtaaccaaattgcttatatctacaaagcatcttcttcaagtattaacccaatggtcaaaaggattggttggtggaaaaggtgtttcagatgcatatgtccaacttggtaatgattttaaactagttttcaaatactttactcaacacgaaatagatgttagtgatttgggtgatgttcctttacaattacgtcgtgtcttagaattgactttaagagaaaaaccatgcgatcaaactttaaataaatatttatttcaaataagagagattattgttacaatgttagagaaattaaaaattaaacaagaattcctcaaaaaccatatgaaaaaggacccacaaacggcaagatcaagtcaaaaccatattagaaatacatcagtaactagcaatatttcgttagtatcaacaacatctccaattaatcccaacgttagtgaaaagaatccatccaaacaacaagacggtattagcaataatgtccaaaaaacacagaatagtgaaactgaggaagatgataaatctgaagacacaatgataaccgccaatagtaaactttcacctgatggacaagagtctttagttgcacacaataataaagagatgactatggaaaatagtgatgcactttctcaattgaaaaatggcacaaatattcaaagacgtgcttccaaaagatactctgcttaccatatggctaagttaactaaccaatctacgtcagaggcaattgcagcagcggcagtagcaaatatgtcaactgtaaatgtaaataataataacgtccatcaaattgataatgacaacaacaacaataataacaataaaaatctagctataacaaacgaaagttcaaatccaattacaaacgaagatatggtgagaaatggagataataaaatagaaaaatttaaccaacccaatccccatatttcaatttataatgataaagatatgtatacaatatttctgagattagaaggaaaaaccaaaaaatgccatatccccaaagtctcatctttaaacagtttaagattattgtttgtggaaagattcgcttattcacctggtagcaaaagttttccagatatttacattaaagatcctcaatattcagagttttatgagttagaggaacataatttaacagatttacaagatggatcagttatagaacttcgatcaaagggggagtccctccaagttgaaaaatacatgactgatgttattgaaacatttaaatcagagattaaaaaatcacaaaatgaaatacttcgagttgttaataaaatccaagaaaataatttcaaaattactaatactgaaacatcttacgatatgaaaaacgattcaactaaaagtaatcaaacagatatacaacaaatgttacacaatttatcaattttaaaacaaatatacacaactaacaaaaaggaaactaacgaaaaaatccaaacaatcctttctaaagtggaggaattcaaatcaagttcatttgattcaaacaatgaattatcaggagtcagcacatatgttgaaaaatcccaagataaattaggcgacatttcagaaaacttattgagtaaagtggacgatctacaggatttaattgaaattttaaggaaggatgttgcaaatcgtggcgctactccatctaataaaagacttgaatcattaaacaaagaaataaaagaagcagaggaagatcttaaaaacatgcaaaaattcattagtactgaaaagccacactggaaaaagatatgggaggaagagttagataaagtttgtgaagaacaacaatttttaactcttcaagaggatttgattgtggatttggaggaagatttacatcgtgcatctgaaacttttgatttagtaaaattatgttgcgaagaaaaagagaaaaatcggaccaaaacaaaagtaaatccacctatcatgcctttattaaagcctggtacttttaatcaagttagagaacaggtactactagaagtacaatcattaaacccggatcatgaaggtagacaggatgcaattgaaagggcagaaaaactttgggaaagagaaaaactatataaagaagatgacgaatttaaggatgaattagggaattttgtagaaaactcttccttacgaaaatctggaggggttgaagctgtagaacgattaagacaacaaaaagatgcagagaatttaagaaataatttttcaaataatttttgatagggaacattagtaatccttttagaatttacgatatataaccattacagtgtcggatcatgaggctaacttcgttatccttcatactgtacacaaaattaaaaaaagaattggaaagaaaatccaacaataaaaatcaacttaatacataaataaacatattctattaagcttgtaacaaccaaatagctgtagaaggatatataatacatgtaaaatatgtatagaccatacatgtatatacgtatgtatgtatttaaacttgtaatgctttaatgaatatttttcatattttatccctacaaattctatagaaattcgggattgcaatatgccgctcagtttccaaaaattccgcctcattataggaaacttgaaaaaagaaatgaaaataaaataaaccaacaagaagagaataaaacatacaaagagattcattattcgagaagaaattgtgaaataattgcagttagacaagtattcgtcagagatgtttgtcaataattctcttcaactgttgaaaaggatttatcagtgagatatccaatagtctatttttcttttctatttttgcttactttttttttttaacctcgtttcattgcacactataaacaataagtaattaatggtgaaaaaaattcataatcctttaaagatagattataaaaattgtattattgaggataaattattacaagtcaaaaactttgaaaataatgatatccccgacttaatacctgtatggacgttacaaatcaatcccagagattcgaaaaaaattattgagctcatacgatctcttcaagacaaagatccaatatcattacaacatctcaaaagaatccaaaaaaccaaggataacaaatttttgtgtgttgtgatattctctaaagaatacatggaagataaagatcaagtaataaccttattacaaaaaaatgatattaaatataattcaataagtgacaacgttttggtacctcgttttgcaccgatgattaaagagttagtgcaccaatggggaaagaagtattggccattgacatggaatgggaaccccaacgatcaaatattaaacgactatgtcatcaatatggactcaattaaaaatatgttacaaaagatagccaatctcagtgaacgtgaatatacaaatgggaataagtttccgattgtaactgcatttgttgatcctataaataataatgtaaaaattgtgacaactgataaaagatcttgtaaggacgggtttgcattagatcatagtattatgcttgcaattaaaaaggtctctacattacaaaaaatgtttaaggagaacaaggacccaataaatatgacatcttatctatgcttaaactatgacgtatatacaacacacgaaccttgttctatgtgtgcaatggcattagtacattccagggtcaaacgatgtatatttatcaaaccaatgagcatgactggagcccttcgatcagatagtggagatggatactccttacatgataccaaggtattaaattccaaatatgaagtgtttcaatggttgggtgatgaatatgcaaatataccagagcttgatccaaatgtatgttgttagtgcagataataagtgtatctatacatgtatatgtgtatgtagcctttactgctgttcaatattattaacatgtatccatttctatatatcttcaagcttcttcatactatctttcaatccttttagtttatcaatcaatctatcaatagttgcgttctgattctgttcatctgtgttatctcccactaattttagtgaatcataaaaattatgtaatatattggtgtgattttctaattctgaatttatatatgccaatcgtttatctaagagaagccccatctcataaagattattaataaaggtctccaaagtaaaatattgtttcatttctctctctgtgaagtcagatatgttaatttgtttaaacaatagtaacacatctttaatctgttgagttatctgattcaatagcagattgtcttgatcttgtaaaatggaataccatcttttcatttcttgctcagtagcattgatatctgattctttaatcagtttggtgaattcctcaaagggtaaacaatgcgtggctaaaagattggaaaagtattcaacaagtaatttattttctagcatttgtctctatatttcctatttctgtcttattatctggcttgaggaaaatactgtcaataatgctcaataaattttagattcaattgagagttacataccttataacacacactaacctatatacctctcttcctccttttgctttatcttacttatctaacaattttaatttcttcttagatttagttttttcttcatattcatttcatttcatttcttttttccctttttggaaaggggagacggaggaaataaaagcctgtggcggaaattacagcagaatgctaattcgaaattgacaagaaattttaactggtgtgtgggtgtttaatttttatgtgacgacacaatctgcgagaaaaaaaaatgagaaggaaaattttttgatgacttttgtattcattgagaataaacaaagttagatgatgattttatttgacaatatattggtataggactatttgacagttgataaaagtaaccttaatgatgtactaaggttggtttgttttatttattttctttttggtcttttcttcgtcttgtctcttttgtttttatcttatttgtttttgttactcatctcatagttcttgccttcttatgactatttagtcacttgaagatttgttagcaagtgatatcaacttcttattctgatagacgagaacagttactaataactaaatacagagatacacagaatatttagatcaagatggctcctccaaaaaagacagttaagatggatttaaattccttcttaaacgattctacatttgacaattcctcatggggtgtggatgacgttgatttaaacaaaattactattccaattgaaaatgtaagtgcaaatactgttccattagaagagattgctgctgctaagaaaaaatctatgttgaatgattcttccttcaatggtggaagaacctccagattagatccagctttagatggcagcagaagagaaggtggtttccgtcgtgaacgtgaagaatatcctgtcccagactctcctccatttagggccattattaacaacattccatgggacatctctccagaaggtgtcaaggcttgggtcgaggacggtttaaacaagccaggtgccgttgaagatgtggacttgcctgttagtccaagcgatccttccagattgaaaggtatggcttttatcacttttacagaacgtgaagacttagtgactgctttgactttcaatgccaccaagttgaatgaacgtactgtctatgtctctgttgctgctccaagacgtggtggtggtttcagaggcggttctgatcttgattggggtgctgctcgtggttctaacttcgaaccatctaacagaagagaagaaccaaacttagattggggctctgctcgtggttctaatttcagagaaccaagaccatcaaagagagaagaaccaaacttggactggggtgccgctcgtggttctaatttcaaagaaccaagaccaccaaagagagaagaacctgaattagattggggcgccgcccgtgggtctaatttcagagaaccaagaccaccaaagagaaaagaagaacctgaattagactggagtgctgctcgtggttctaatttcgaaaatagacaacaaagatcttccggattcaatagacaaaagaaaaaggatgaacctgaattagattggggttctgctcgtggtgccaatttcaacagaagaccacaaccaatttctggcagaaagattttggctgaatctaaggcggtagaggaaaaagttaaagcccaaaattcttcctttgatattttacgtactgaagacgatgacgatgaagaagaagaagaagaagaagaagaaaataacgaagaaaaagaagaggaagaaaagaaggactcaaccgaagttgttaacgatctagctaccaagactgctgaattgactgttgaagatgacactgatgataactgggaagttgtcggcaagaagtgatcgtatactattgtgttatgaatttaaagagtatttttcttcatcgtttaaatgtttttttttattttgtgttgaattgtttaatatatatccagatacacaaattatatgaagccccatttgttgttactattactagttggtacctgtttttgtttttgttttcctactaaacttattctaattccatatatatatatatagaacctatatatagttgtttaatatgtataataaaagagatataaaaaagaaattactacatcttataagacatattcactttttttgttgttagatattagatttaatttcattatattcacttgaataaattaatttatgccttatatgcgttagtatccacctccacatgtttataatcaatataataaatgtaatgccaaaacaaaaataagaaaaataataaagaaaagaacagatacaaatgaataaagcctcttacctcttcattctttaaggtcatatacaaaataatatcctaaatctatcttccctattcatgaaatagtaagcaaaagctaatgcttaatatatttgataaagattttgccccattaagaatatcttcacgagatgttgatcctagagatattattaaagattctagaattaaccatgaacaaatgctgaaggcaaagaagattcctttggttgtgagtaaatatcaagatatcattatagagaggtctaacagtgaaaaagtacaatctctcattaacaatagttcaaatattgatacagaaaacagtggacaaagtaagccatacgatactaaaaccaaggataatcacttatcgacactcagtatagaagaacagtatttgttaaaaatgattcaagaagaattaaaagcgaaagtgtttttttctgggagtatgtggtgtaataaacagaaccaattaaatataaagctatcatctcacctcattcctgtggttaccaaaatttataactatctaacagcattgattgaacttaataatcccgctctgattaatggaaattacctattgaatcttataaaaccatgtaacactaccatacatatgggagagattggactatattattctattcaaaaattaaaagaattgtatacagattactcctttatcataataaatataaaagatcgatcaagtattatgcttcaacaaatactataccaagttatatctcaaattgacgaaattgatccaaatcttattgagaaaattgaaagcggaacaatttattcgaattttattaaattactaattaatcttattgaatattcaaactttaaattacatagaaagtcattgttgatttttattgataaatcaggatgtctaatagatatttttaacaattgcttgaatgataccaagtcttggaaccgaacaattaaaatcggatacatacgattatctagcaatgaatcagatggattagtcaacattttttgtgatagttatccatccaatgaaggcgaatattttcaagaggtgatatataatttaacaattagaccctgtaataaaaatgaatttgttgatatatttaatactactattgttgaagaaatagggaaacaagaggatggtctagctaatttattaactaatactataaggtctaattacaagaataatgcaagctcattagattgttaccaaaacattgtaaaaacattgattatctctagtaaattatcccattcaaacatctcaagtacaataaattccacccctgatgtattataacaagttaaatacataatatagatatggatacatttgtgaaactagatatttcgagttacagtatatctttttaagctataacctattgattgttttaaagtagtaactgacgcatttgaggtttattttcttacaaataaaaaaaatatcattatgtcatattttaatacctttcttgattattatatgaaaaataattaacaataaagttgagaaatgtttcctcctgtatcataaagtaatcaagacaaagatagatgaaaccaacttctatctttcttgagaaatttggtggttatttttaaattattatatggatcatccaaattaaatagtgtcatctaggattaacagagaatatatttccttcttgattctgaatggtggtttcaaaattaactcgttggcataccataaaatagcatttttataatatcatattaaaccaaatatatatgagttcctttaatgattacagattttaatttatggttatacctttttctagaggattaatatattctgatggactaactaaatcatatcttctggagagaaaataataatattattcatactagacagtagtcttttatttctacatggaaatgagtactacaataacaaatttacattcacattgtctacattacgataatttaagaaggacacctaatggattaattttcacagaagacctagcaactgtctatagtatattcttgatctgtatgaatcttaaatctcatcctgatgaaacaaaaggattgttttccggaattttcaagaaggtttatccatattccttctctatgaagacagcaattataaccatgaaacatctagagataaaggcatcctcaaacgtcacatgcattaatctgtcataccatattaaagaaccattagctagatatcttctaataacctttatggaagcaaaattgttacatacacctgctgatagaactagaaatgaaccaaaagagaaagtattgttacaacctactccaaaaggtgttgctatattaactaaatattgcaaagatattggcttgaaaaaaatcccagatatattagtatcagaattgaattctattacacttttcaattttgaaaggagctccataactgattccttgattcatagcgataaacttctgcatattttgctaataaaaataatgggtgatgaaccaaatatttggacacctgatcggaaaccagataaactacctactttgtcacagttattggaaaatagtaatgatattttcacatttgaaaatgtgtttgattattttcataagaaatttcttgaacatcctaatcatacttcttttaatcaattgaaaacaaatattaaagatagtatagaaaaaaaagatgaaaaatatacagttagggtcaatacattgaataatgatgatattgatagtacatttagtcacaataataaagctaactggtttgaacaaattccagaatctatattaaatgatacagatagaaaatctccattatctcataaatatttcacaaatccagactcagacgctcatgtccaatattacgcatcggataccaatttaagattattttacaatagacaatttatgaatccaaatatcaatgtcaaatattgcttcacatccaaagtactctggcagtggcttatggattgtactaatataatgtatccaggagaagctattgctctttctgcattatttttaaaattaggattgatttgtccgattgttggtaaaccatctaacgctaaaagtggtaagttttgtatcagtcgatcttcattttttaccttatcaactagaggttggaatataattaattgggataattgttataaaaaatgtcaagattctaatgcattagttacaaatgataataataaagattgtaatgatgataacaaagactacaatgagagtgataatgattcaagtggaattcatgttaagggaaaagttgttgaaatcgagattaattctgtagagtctattaagacagtacaagcaagtattcaagatactataaatcaagataaatgtagtgatttacctaatttagaagatattctatctgatcctggaatgaggtatttatttagaaaacacttagaaagagaattttgtgtagagaacttggatgtgtatttaatgatcagaaaattcttgaaaagaatgacaatcctaaaaaaatatatcgatgacattggttttaaacctatctataaatataaacaaagatctgtccattatcaaaagataatagctactagagattctgcattataccaacaagctaacgaatgtttagaaatagcatttcaaatatattcttgtttcattatgaaaggcgcgccatatcagttgaatttagaccataaattgagagaagaaataagtttagtgatcttgagtccacattcccctataaaagaatattttaatatagaagagggagctgttaacactcttactcaaaataatctcggaaatggaaaaaatatatcagagtatggattaattgaaaaatccatggacactgtaaaggacccaagaggcaataggtatgatgacaaaatttcaagaattttattaatcttgaaagaattatatccactttttgaagaagtcagtattattatatatagattaatggagatagactcgttatcgaaattctataactctaaggaatttggaaagctcaaataaactatataaagtcttttattttttttattagtatcatatttattattattttacaacagaaaaaaaaaagaaagaaacagtatacatatatatatatatatttattatatttaatatgtttcaatgtacgtataatatgttgtcgatgcaaaattattaatacaaaacaaggacaaaacgaaacacagtggctatacatacacatgtacatatatattcaccaacaattaaaagcaaaaacaaataaaaatagataaacaaaaaacaaataggtaaagtctgtcaatttattatatcgttttttatctttttgctataatttaagctacaggttcaagagtagtacctttcttaattgtagcccatccaattaaacgccagtgcttttcgatacgtctagataaggcgatcttttcattgatttcggtacaagcaggagaagtcaattgtaatctagccatgtctgccttaacggcgacaacacgagcaccggtagcagtagacccaatattaaccataagaacttcatctttttctaattttttgactttagcttgtttttgaccgtctgtcttgacacccaaaagacgtctcaaaaggaaatagttgatttcaatatctgtgtaaatgtttggtaaatggccctttgcaccgacaacttgacctacaagacgatctgctctacataaggttggatcgactttagtacccacaccaataagaccaccagggacggcgaatttcaaatcattttgttcagcaaatagagagacgatatttgagaagattggtttacattggatcttacctctttcatccttggtgacgatacctggcctgatctcaatttcgtcacctagtttgaaaacaccattcaaaatagacccaccagcaacaccacctttcaaatcgttgatttctgcacctggcttattaacatcgaaggaacggatcacaattaattgtggagagatcatgaagtctcttggtgggactggaatggttttgacgatgaattcgttgactgcgtcaatgttatatttcaattgagcagagattggcacgataggggcaccatctgcgatagtacctctaatgaattttagaatagacttttgatgttccaaagcagtttcctcacgcattaaatctactttattttgtaaaatgatgacatttttcaatttcataatttctatggcagccaaatgttcagaagtctgtggttgtggacaggattcattaccagcaattaatagaagggctgcatccatgacagcagcaccggataacatggtactcattaaaatatcgtgacctggacagtcgacaaaggagacgtgtctaaccaatttgtaacgacctggacagcctggtctttcacacttggggttaatctctttatctgatttgaaagatttgtaacagtcaggttcaggacatgtaggttcttgacatttatagatctttgcattggcataccccagtttgatagtaatgtttctttccaattcgtccttaaatctaacagtctggacccctgagatggctctaacaacggtagacttaccgtgtgctacatgaccaatggtcccaatattgatggtagcttgtctgttaatgatttcaggggacaagggatttagttgagtgaagtcagggttgcttggttgttcaggtaaaccaccaccttcttcaaattcacgttttcttctgtcttcttcagactcggcatcttcagagaaagtgacgctctttttaggtttaacatcctcttgttgttgttcttgttgttctacatttgccacaggttgctcatctgggatgtcaccattaatgataatagatggttccctatcttgtagatcagtcatatttatttacaaaatatatttacttattttcggtttgctcgtttgtttattagtccagtaatggagagaaaggaaggggttaatggaaatacaatggaaacaataccgatctatcaatgtacctatatatttgtctcttgatccttaccttatctttattagaatatctataacataacactatagcttataatataaggtcaattaactacaagtaaaactggtcagatatttgcaattcctcattaaccaaatgaataacaaaatctgtaataaaaaaaaaaaaaaattatagcagaaaaaagaaaatttttcacttttcaatttttgcaatttcttccttgcgtgcggaatttaattccaatgtgtttccgcaacaaacccgtcataattccgaaaaatacgacatccacacacccaaacgtggtcacgtgaaaatgtcaaaaataataaaattaaaaaaaaagaaaaaaaaaaaaacaaaaaaacgctggagtaaactttctgcaaaatacaaattgcgatgacttcagcagagagaacaagctaagttcttacataaaaattctgattgattggattcttttggacggttaaaacttcatcttatccctctctcaactttctttctgttggtgcctgtgtaccctattttataccagctatatttatcctcatattataagtgtcgaaaagctgtatatctaaacacgatatatatatatataatacatgtaggtaccactacaactactactacttctggtgaaaccgatataaacgcaattggaattgatatttgtattgtttggatttattctatcctcatatcctgttactagataattattattcattttctttattcattttcttttttttttgttctatgttataaatgataaatacatcaagtaataataaaaatagtgatcttacatcagctccctccacatccacctccactccttctcctactcctccatccagttctacttccagttctattaccaattccacctcttctattctttctactaaaaaaaagactacaagacgaaaatttgcatgtgttgaatgtagacaacagaaatctaaatgtgatgcaatggaaaaggctcctgatccatgtacaaaatgttttaaaaaaaagattccctgtgtgcttaaacgtgattttaagagaacttataaaaggataagaaacgaagtcattgaaaaaagttttaaacatttaactcaatatttatccaatactcaattcagtagtatcaataattgtaataataatagtgataatagcaataatattactaacaacaacaataataatattaatcataataataccatttatgtcaaatctttatgggataataataattttacaaaagataaaattaaaaataaatcagactattggaaagattttattaataattcaacaacaatacaaaaacaaatacgacaagaagaaatcaatcataatcataataataatagtaataacagtaataataataacatatcatcttctcaattgaatttacctctgactttgactgaagaggatcttaaatgtactcctaaatccttaggtgacatctatttaacaagtaatgacatatcaacactctttaacgaatttgctcaacattatcatccctttttacctatagtcaacctgaaaagaggtccagaaaatatttacagtttatccccatgtcttttttgggtcattatgctgactgggcttagacggtgtgactcaattctaaataagtataaaaatattaatattctaaaacaactgtcccatttagttaaatctgttctagcagagattacaatatctccaatcatccggtatataccaaatgaaaatgaacaacccctactaaacgtcgcatctgtgtacagtgttcaagcatttttgatttatactctatggccacctttgacctcctctttaagtgcagatacttcatggaacactataggcacagccatgtttcaagctttacgtgtgggtttgaactccgccgatttctcaaaagaatatgtgactaccaattgggatttaattaatgagcaaagaaagacttggatctgttgtaacattgtctcccaatttattgcttcttcaatgggcttccccccttacgtttccttcgatcattttgtgttaacacatcaaaataatagtaatatcccagttcttttgcaacagatgatacaactttcatactttgaaaatcaaataatccaaactatgaattctaatcctttgactccatcaggaatgattgatttacatgagcgattctctcttttaaaagtattgaatcaacagttatctcaacttgagtttcaattaaatcaaccccatcaaaaaatggatgatataagaaaatttttgctttatgtcgctaaagttcatcttttaacctattatttcactgtttcaacaaaggatcatccagataatggtgacattttttcatctactaccacaatgaatattaaaaataacaatatctcaactttccaaatcaagtccgggttagttaaagtctataactgtgcaattgatttattgtttcatacaagagatatgttcctcaaggacccagactccataaaatatttccctggttgtttcattctaaatatttggcaaagtgcgtgtattgtcaccaaattgattcactcctcgatttcggatatcatcgattgtaaacgtggggaggaggcctacgatgtagcaatcagattaactttgaaggcatctattttgaaatatgatatggcttatcgatcctcaggtataatgagatctatttggagtcttttctcaaatatgtatgatgaatggcagaatgacaaaaaaaatgcagataaacaaaatgatattgaatttaatctgaatattactgtcagttcaaggatgtctgttagtgtattttttgactgtttatacattttaaaaacaaaatgtgggatggctaaactgaaaagagaaagtggtaagttacaacacgatgaagatgaagaagaagatgataacattgagaatattggtgatgatttgatgagtgtttcgaaaagtaccatacataagaacgttaaggatttaaaagttaatgcaagaaaaattattaaaagtgttccattagatcctaatccaattaatgcagataattccagtacaatttctatagcacctgatataaataataatactacagcagttagcactattgtcactgcagccaatagtaatgctactaagaatgataataatgcaacatccaatataagaagtggtagtaatcctggttcaagtgtgattgaacgtcctccattatcgatagacagtttaactaatgtttattcaaatgtttcttctccagcaatacaagcacaaaagaataatgtacaactgttggtcaataaacagaatggcaacgatattagtaatattgaaaatgattcaatgaaaaacacacatataatgggccttaacacaccaatatctcaatcaactaatcaacaaatgcacgagaatacaagcataaacccacaaatacaattacctactctgccatttgacagtgagccaattaattctacatctaatttacaacagtttcctcttgagagacgttggcaagagaacaatttgtcagaagtggtatctttagaagaaccgataacccataatattaatttaaatcatgttgttacttcattgtttgataataataataataataataataataataataataataataataataataataataataataataataataataataataataataataataataataataataatagacaaaacagtaacagtaataataccagtgtacaaacagatgtatcaccatactcaacaattgctaattttgataattgggattctgagatggtttggaaagatgtcgatattttaatgaatgaatttgcatttaatcctacagtataatcatattattttactataattcttaaggctttattgcactctgattccatttatagatttaataacatatattgatatataattaatacaaaacaatatatatatatatgaacgtatacattatcctaaaatagctttattcctactgcattattatatgtaaagatatgtttatgaccatacattaacgtttatttttctttatttcaattggaggcttaggatttgtgacattttagattactcttcacaactttttagatattcattttttgttttttacagcagaggagatggaaagattggaaaaagtttcttaagataaagaagtagaaagatggataggaaggatgagaaagtaaaacagatgtctattcagtagttggtctaactaagtgcagggaaaaatattctagtgcttcatatgtggtatttatacgtatatctaaatatttagttttttctttacttttgatttaccacatgataatttaatttacaaattggatatacgaaaagttatacaaacattgctaaataaatggccaaaaagaatagaattactaatattggacaagaatttattaaagcttctagagatatcaaattattatgggcatcagtctttttaagattactatcgtatgggctaacaaaccaagttttaactctttttttaaacaaaattaatttagatgagtccaaaatcggtctatttatgtctttgactcttgtaggtgatgtcttttgttcatatattttaacatggtatgccgatgtttggggccgtagaagaattttggtctatggttctgttatgatgtgtttaagtggaatcgtattcgctacgagtgaaaatttccatatacttcttttatttgctattataggtgtcatatctccatccagtgatgaagtaggaccatttaaatctattgaagaatccatgatcgcacatctttcaccaaataataagagaccagaaatctatgcaattcattctttagtaggcacgattggttctgccctaggtgctattgtatcaggctcatttatatcaggattgaaacattataaattggcaaatacagacttacaatgttataaagcgactttccttttatatgctttctttgcattttgtaaagttattattatggtttctttgtctgaaaagactgaattagattctcactattctaatgaagaacaattgcctgaatctatagtcacagatgaaatggcaccattattagaacaacgtaggaaatcaattgatatccaacaagaaacaacaagaatttcagattcattgaatgaaagtactgtaacacaaggtgactatgaccaagactcaaataatcaaaatcaaattaattcaaataggttgtctccagagactgtatccattttaatgagattattatgtatttttatgatagattccttaggtgcagggtttatgacaagtggatggatggtctattattataagaaatggtttcagatgggttcatttgccttaggttcgttattttttatgattcagattgttatgtccatctccacgattccctcgtctatcttacctagaatttatgggcctgttaaggctactctattagttcaaattccatctggtgtattttctattttgattccatttgctgctaatcatctatttatctccattattttactaaattgtttctttggtactgcagccatggatgtaacctcaagacaaattttgttaactaatttaatacgcccaactgatttgactaaagtaatggggatagtaaacataggtaaaacttttgctcgttgtatcggtccaatctttacgggtatgctagctgaacgtggttatctatggttctgttatattatcagcggtgttttagttattgctgctgattgtatcttagcatgttcatttttacatgttgacaagactattttggcacagattaatggagaatgagtggtggaaaagatttttttcagtctcacgtgtagacatatgcatatatagtttgtgtagattttataaagtttattcgacatttgatattttatttccagatcaagattttcttttttgtctccatttatggtttgtttatatgttctcagatcaagttttggataataagtggatgagtacatcgttaattgatccaaactaatagcttgtgttactctccgtttacaaggaagcacacatatagaaggattatcacaacggttagtcaaacctggctcaaaagagaattttttctttgttttttttttcttaatcttatatattaaaaggtaaaagtgcgtatgatattatacttgtattattgttaaatgtgttttatattatatgttaaaaaagaaacaaagagatgggattgatacataggatatacatgtacaaataaaggcaaagtttctttaacggttagatttggcaacacgttctaattcgtccttcttcttgatagcgtaagaagtagaagaacccttggcagcgttaattaattcttcagccaaagtttcagcaatggtcttgatgtttctgaaggcagcttctctagcaccaatggttaataaagcaatggcttggttgactcttcttaatggagagacatcgacagcttgtcttctggcagcaccaccaccaccgattctggtagtgtcttctcttggaccagtgttagcaatggcatcaacaacgacttgtaatgggttggagtcagttaagatgttgatgatttcaagagtgtgcttgatgattctgacggccttcaacttcttaccgttatttctaccgttcatcattaaagagttggttaatctttcaatgattggacattgagcctttctgaatctcttgttagcataacgaccagcagtgtgaccaacaaaaattggttgtctaatttgaatgtagtcgactaaagatggatctttaacttcaatatcttcaaaggaccatttgttgaataacttgatttcagtagaacctctttggacatcttctgggatggcagtagctaattccacaggagtgaattcttcgacgacttcgaaatcttcttgaacttcaactggagcttcaacgtcagacatcttttctttgatcgtttgatggtgttgctttaacccttgaggcaaaatgagaaaaaggttttgaattctgaaggctgttaaatagcgaaatttccaacgtctacggatagcagtaacgtgtatttcaatactaaaaattcactaatatgtaactaaaagcacatattgaataatatctttaactgaggttgctactagggtaaattacaataatcatttggtgcttagaggaatatcgacaccacctctccattactgattcttactgttggaagcatggctcaataggtcgacaagaattcatcgataatttcctctcatcacttctctcttggtcctatgggggccattccatccccgctcaccgtccccattcaccgtctcctgtctactttcacggtttacagcacctcactctttctctccttccctccctgcctacaccactacctgtgtgggtggggttttactccaaagggacctcccttctattgccaccagcacttgtcctttccaatctactgtcatgctagcgttgcccctttcacctctctctaaacatcttgaacatacgcatacgcgcacacacatacacccacacaaagacattttcttattgggagtcctttggctgtagaaggaagacttgttccctaggacaagaattctgattcaaaagagttttccttagagtgtagttttgtccagaccactgggagcaagaggatgttttcgaaaaaaaaaaaacaatcttgaggttacattatgtgttttgcacagaatcagggaatgatcggggagaggggagaaagcgagaaaccagaaaaatataacgtctaatatgctgtcttggaaataggaaaaaaaagaggaaaaacaaaggtttatttattatattttcgggatgttctgatgtatattagatagaacagtccttgaaatacttacactttgatatctttgtatatcttaaaccacattcaatctacgtactgttacaaattaatcaaaacactcctttcccattcttgaccatactatgaataatagatgccacgtttgtaaatttatacagggctatagacaaatatatagaatatatcatattgtttgcttgctttcctttgtttctcttcttgttgttttttttttatttgtgtctttgattggtgaaccatgtgtcataccagtagggagtttttatcttcatatttacacgtttaccgctaggcgtcgtcaggtagaacatgtcttcaacaccagaatattcatcaaaggctaatgggaaatattctgtacgtaacaatacaatgccaacatcaccttcaaatgcaatcaaagttccgataggtcttcttctcttctttgtaactgtggaattactttcattgaaggggtttgacactatgttcgtattgtgagcggtattattattattattattattattattattgttatgatgataatacttttcatccaattccacatcaaccaattctctagatgagctagcgtcatatgaatttaacaattcatttaatggagttggattattgaacacaacacttacaattcttttccttaaaatgccagtggatagggttcttgcagttaattcttgacccatgtagcaacctttattgttactgattgagttaggtagatagtcaaagttgcattctaatggtaacaaagtggttgatttgatatctttgacgccatctaaaaacccatattttaatctttctctcctgaaatatggactgttatcttcatgtttcttaacctcgatggggaagggcatcattgatatattaaaaatagttccgatatctgagacagtatcctttgccacaaaacggaaatgggcagatgcgctaccatctttatatagtatctgctcataccttctatctatatatccgcctaatatatcattatttgttttaaatagtgtgtttataacattcttactaaacagctgtgcatcttcaggtgttttcatttgactcattggatccaataaattatctatccatggattctctacctcttttggaatattttggaatcggattattatatcccaacaatttatatcaccaacatgttcaagcttgaccctactccctaatttatgtgactcaaataatttggacatgtatgacataatctccttatcaaattcgagtaaatactcaggatatttcatattcaatccatttgcaataataggtgtacaataaagtatagaatctgttattaatttacccttcccgtttaatagccctgtgtactgtccaaatctaataatatgttccccatatgggccacactcttgatataacccccaattggatttatcagtaggaaaatcgataatacttgaccccttaagttgtgatttatcgtggtcgtttattgtcattagatttttttttataaaatatggttgcagtttggttgtcaccatgccattaagaaatgggattgtgtctggaccacggacctttaggtatgttttatgggttagtttcgtgtattgaaataatccagtaacttcattttgtgatgataaattgctattgaatcttactgattggagccttatcttttggactatatattttattcttgtatacatcttacttcaatgttttgactggctatacagaaaggaatagacacaatatagttttcagtgtagagttaagtaagaaaagacgttttgatattcatttccagtatttatttcttttctctcccctatatgcaaatcgtggtaatattttaaacgttattttattacttaattagagttatacagaaatcaaaaaaaaaaaagacaagaaaaaacaagaaaaaacaagaaaaaggtaataaaaaccgagatacaaaatatatagtaaccaatctgaaatctcaaacgagcaatcataagacatttgtttcaccaataaaaaaaagctattatcagttgaatgaaatcaatttgcggacgattttcaattaaagaaatataatattacttattttatatcggaattcataggttagaactggaaatgaagaagaaaagattaaagagaactacctcattcagtgtaaaataataatagtgataatatggatagacttttctaataaaatataataataataataatatttttttttattttaatattgattagaatataaagataggattatattgattatttactagaatctttttttttttaaaaaaaaataaaaataaagataacataacaaggagctggtagaattgtaaagtatatgaaaggttaaaaagataaaatggaggatgaaataaacaaacaaccaaataaaaaaagaaaagaaaagaaaagaatatttatttcgatccacgattttatttagcttcagcagctaatttttctgctttagcaacaacatcttcgataccaccgaccatatagaaagcgttctctgggatgtcatcatatttcccttccaaaacagccttgaaggaagcaattgtatcctttaatctgaccagtttacctggaataccggtgaagacttcagcgacagcaaatggttgagacaagaatctttgtatctttctggctctttcgacggttaatttatcttgttctgataattcatccatacctaaaatggcaatgatatcttgtaaagatttgtaagtttgtaaagtttcttgaacctttgtagcaacatcataatgctcttgtccgacaacagcagcatctaataatctagatttggaatctaatgggtcaacagcaggatagatacccaattcggagatacttcttgataaaaccgtggtagcatctaagtgggcgaatgtggtggctggagcaggatcagttaaatcatctgcagggacatagacggcttgaacagaggtgacggacccttttttagtagtagtaattctttcttgtaaaagacccatatcagtggccaaagttggttgataaccgacggcagatgggatacgacctagcaaagcagagacttccgaaccagcttgtgtgaatctgaaaatgttgtcaatgaaaagcaagacatcttgaccttcttcatctctaaaatattcagcaatggtcaaaccagtcaaggcgactctggctctagctcctggtggttcgttcatttgaccgaagaccaaagcgacttttgattcaccttccagattgataacaccagtttccttcatttcacggtataaatcgttaccttctctggttctctcaccgacaccggtgaaaacggagaaaccaccatgtgccttagcgatgttgttgatcaactcttggatgaaaacggtcttaccgacacctgcaccaccaaatagaccgatcttaccacctcttgcataaggagctagaaggtcgacgactttaataccagtttccaggatttctgcagtagtcgattgttcggcaaaggttggtggatcggtgtggattggttttctcaatttagagttgattggacctctttcgtcgattggttcaccaataacattgatgattctacccaaggtttctctacctacaggaacagagattggggcaccagtatctatgacttcttcaccacggaccaaaccttcagtaccatccatggcaatagttctaactgtgttttcacccaagtgttgagcaacttctagaaccaatttaccaccggttgggtttcttacttccaaagcgtttagaatagcaggtagattagcttgatcgaattgaacatcgacgatagcaccgataacagccttaatcttaccagaagcaataggggcgttagttgcggcagaagaagaagaggaggaggaggcactagcgttggattgagtagccaaccctctctttagggtagtgtcgatagcaaatctcttcttcttttgagccaagttaaaaacgcacagatttctaattgggaccattctagaagaattagttaaagaactaaaacaacgagcactaatggcctttaatgcagtcttagaggaagcactagtagcacggtatacagttggcaataccattattttttttttctttttggaatattaaataaaaaaacaaaaaaaattatatgatctgatattaaatctctaatattatatattttagtaatttgttttatttgatttgattttaattttgattttttgtcgatgtgttcttggttagtcttgttaattttattcttattcttattcttttttttattctttttcttattctttttcttcctgtttagtctcctatagttttctcttctttctttcaaaaaatcgactttatcaaaattttctcttttattctgtaattttggtctagtgttgtaaatagagaaagggggagggggagaaaagcagaggaaagagttgggaaagaagtatattaaacaagagtgagatggagtaaagaaaataaataaataaataaatacaagcaagagacaaaaaaaaaaaaggaaaggaaaaagagagaaagaaatagaaaaggacgattgatggcaagtgacagagagaccagtgaagtatgttagaagtgtctaaaaagaaaggtgggagacctaggtttaaaggaaagagacagtaatacacacatgtatagataagtacaaatatctataaatgcatatatatatggatagatagataaacagatagattcgtacaacaacagaccaataaaagagctgagaattggcagcacggaaagtggttctgtgtaataatttggtcaagatgcagatatgattcgttttttctttttctttttctttttccttttcatttttttatctttatttttcctacttattaattgtttaattatctaatcctatatgttatataataatagtaaatgataaaagtgcgtaaatcgagaagactacatatacacacgcacatccgcgccattcgagacggagacaaaaaaggacaggacgtctaactcgattacttgtaagatgatagtactactttttactctttactctttactctttctctatctgccgtgttatagctgttgctgtactcttgaactcttgaatccttgaggttttgagctcgaaagcccacaacattctctgcacctcgatactcccttttttctttcttcccttttttctttcttccccttattctttcccagtatttttccaagtccttgtgttttttgttattgtgacttttattgttattgttattgttttgtttttttttctctctctttgaataaatatttctttcgattccggttggtgcgtaattcaagacttgattggccagttttgtcttgtcgttgtttctttttcttctcgtctcgaacggcagcagaccgttggaggtgtggatgttgttttgaaccctactcgcgactcatgccttaaccctaaagtggcgtgtcacgtgccgtcgtaaccctattgcgatcctctgtgcaatttcttttttttttttgtctttttatggtatttttttttaggggttggaagaagtggataatcagaacaacagagggatcatttttgaatatatattgtcatagacacgtcaccatatgcaagtatgcatacacgcacacacatacatatctatctatatatatatatatatatatatagtcgcatatgtatgtatttaaaacatagttttagtcactctctctgtttttctgccattattttttgtataattcttttaaatatatatatatataaatatatatatatttatatatatgaatataccatgacattagaaaatgttcccactttatatccatcttttgaagatttgaataacccaattgaatatttatctagaccaaatatcactagattgggttttagatatggtttgataaaattggtacctccttctaatattgttactgatactaatagtaatgctaaatttgactatgtaacatatttaaataaagatacaatatcttttaatccaaggctacaaaatttacctcatttgaatttattatatagagcgcgtttattttttgttaaccaattatataatttttttgataacattcaaattgaaaatgtctttttgagaaaaaataataaaaattttacctctattaaaccctttttattagtcaaatataaaccaaataataataataatactcgaactgtccattttaaactttatttctacgatctatttatcgaattagttaaacaaattaaccatattaataacaatgaaataacaaaccacaataaatataccacttttcatacatttgatgatttaattttacttcctctaactgatatattaaacaacaacgctctatggttacatttggcaaaaaaatttaaaattaataaaaatactctgttgaagatatttggaaaatacttatcactttattatgattttttataccatttcaatatccatacccacatcttacctaaaattcaacataatagtttaactgacccagtatctctactagattctcacaatcaactcatcccaaacgacaaggaaaatcacacaatagaaaatataatagacaatccatcagtgatggatcttgatcttgtatgccacatatgtggctcacatatcctagactccagattatttgaatgccaaagctgtaataattggttccatgaaaactgttttaaactaaattattcctactgttcaatcaacttagactctattcagctaaaacattgtcatgaatgtgtaataggtaactcgatatatgggttccccatagatgatagatcttacactataacagaatttaagaaaacatttggaaattctgagatcccttctactcaggaatcaatagacctaggtattctggagaaagagttttggtcgaaagttaataattgtacaggtaacgaaataatcaaatatggtgcagatataccatatccaatagataatgttttaaaaagttgtgtttgtaataataaaaggaaaggaaaatcaaaggaaattgaattgcaacccataaatctattgaatttgcctaataataaaaattctctattaaagtattgtaaaaatttacaaaataaaaagactagaaagaagagaaacaaaaatactaataatacaaatactgatgataataatgatgtaaatgaaatttcagggatgacattaccttggttatatgtcggatctaaattttccacattctgttggcatatggaagatcaatacaccttatcagcaaattatcaacatgagggagcaccaaagatttggtatagtgtatcaccacaatcatgctttgaatttggtaaacgtttatatgaaatgacaccggatttattccttaaagacaataatctgattcaccaattaaccactttggtttcaccatatgatccatatttaaacaaaacaattcatttttttaaagtcattcagtaccctggcgaatttataattacatttcctcaatgctatcattctggatttaacacaggctataatttaaatgaagcagtcaattttacaactgatttttggttagatttcggtatgcgggcagtgtccgattacaaatacattggtaaaccgtgtgtcttcaacatttatttgttattagaattgattctaaaggaatttctcacattgtcaaaggtaaccaattgggtattatacagagactcctatcattttttgttaaattatgttaatattgaattaaaaaggttatatagattaaaagaaatgaacaatcaaagaaatttcataagttcaggcttgaatagttttgaaaagaataatcataaaaaatatgttgataatgacgatgaaataatttgtagtaaatgtcaaacaatgtgtacatatgcctattatgtctcaataaaggaaaacaacagcaaagagaagccctgtaaagccctttgtcttgaacatggactgcaacaagcaagtaaagatagttttaaagaatttaatatacatgtgatacgagatgtaacaaaagtacttgaattactaagtaaatgtagtaaaaaattggatcagttttgataagtaaccaaacattaatatatatatacgtatgtatgtatatatatgtgtgtgtatatgtgtaaaaaggttaaaaatgacaggaaaacatcaacagtgatacttttggtgcatatattatgtgtatatgattatatctgtttgtcatacaattgaattgtactgacacttattaaaaaatttaaaaaactaccaaaggaaaaattctgtggaaaatgagatggcaagaaaaaaaaaataaactttatgaattttcaactacattaaaacctaaacatatccacacgtaagacagtataagggcccatgtgttgtcaggtatatggagaagaatacaaatatcaagttcataaatttcatagataccaataaaaaaagaaagaaataaacaaaaaaaaaacataaaaccatggctattttatcctcttttaatttactttttttaagaatcagtcttctgttaacattagctttctactgtttaaaagatgtcaatataattttaaataattcatattttgatgttttgacacaagcaatgaatcttccagccattcaaatgtctcgtttcagtggtcaattgggattctttagtgttctctttgtattattagcaattaatgatttgatcccactattggaagataataaacaatattttttttcagtggttccagtaagattaaccgtgtttttcattttgactacagtttcatactggggtcaagattattactatttacataacaatgttgtctttatttattcatttgctgaggtttggttaaatttcttaatttatacatctattagagaagagagaaatgcagatatcataattcaaaagaaggccttatctgaagctgaattaatcaattaatgatgttaaataaccttacatagagtttaatacatgtatgtatgtatgtgcacgtatatgtgtataatatgtaatggacggtaatttcacaagaaatcatctaagtcgtctaaatcagatagatcagataaaccaccgtcatccaaaaagtcaccgccattagtaatcgaactattgtcattttgtttctttaaatgtttctttttatcatcggggtatctcatagccaacacactttcgtcgtgtaattggttaatgaatctgattctttcatcaaagactctctgtggatcccttgtatcataaacattcaaaagctctgtagtttcgatgtatccatctttatgattaatattggcttcaatcacaccatctctgattgatcttgaaaccatatattctacggtttgttcagaatctaatgaaagttttaagcatatatccttcaaagatattctcttgtatgttaatgagatgattctaatacctgtcttgatgacattagacctcaatctgacacaaagttggtagttatcatctttaatcaattgtcttttgaatttagttagaacattagtaaatttatttaaatcaccaagttttactgtgttagttagatgataatatggatataaagatttttgcatatcggtttgatgaaagaaggataattcaggaatatcacccattaataattggataacaccatgtaatttatttgcttgttgtaggaaacctaatgagtttttattatgtggagcttttctaatggctgcaataatatagtcattagctgttgaatagttcaattgaattgcattaatcttggatagatagaaatagtaccgtgcttctagagaacttgtgacgtcgttggatgggaattcaatttttgatacgaaatctgatgcataattaatttcacccaaagtgataaaatttcttaagatagacacaattagcattgctttggtttcattatcgtgtcttaaagttgacaatttcagaaacttcatcatttcagaacgtagttcaatcaaattgttgttaatatttctatcaactttttcatagcctagagtgatataaaaccataatttagagttgattaaatccaaagatgacctattgatgttattgttgttgtaattgttatttgaaatgtcctttgtttcatctgaagaagaagtatatctttttaagatatttggtaaaactactttttgattgaaaagatttaacaaatcgaacttatgactatcaaataaatgaatctgaatgattaaatgaacaaaactattgattgaaggggctacttcaatgaatggttttttatcaattggtgaattattaattacttgatagaacctaactggataggaatcccttatttttgaagcatctttgacattagtaacatggttatcatttagatattgtagaagatgttttttatcatgtcttggatctgtatcagggtatagggtgtcgcataagactgacaaagtttcacttattagtagtcctttttttctcagtgtggtcaattcatttaaagctctccaaacatgacgagagtcggtggtagttagattactcttagccaattcctttaagacagagataaattgttcaacttctgtgcttggtacaaacatttgttgatcggttgagttgttgtcactattattcatattgttattagaccgtatggagaattagattagcctgtagtcgagtaaaatagaaagatgaggacagacagtgtttctgatgctaatcttgttacagaaagtacaaggcaaacactcaatatgtatattttgtcgggtataaatataggcacaagtcaaagtacagatgtagatatggttacacaaaatgaatcaacatatttcagttcccctcttcttttgctctgtgttggtggcaattttttttttctgtttcttttttgtttgcactctcttagataaagaaatctagatctttggtatgtggtgtctggatgcacacgtactgctgctgtgaataaagaattcctgacactttaaccattgaaagtagtattttgctacgtttatgcggatgtgtataaacataataatatatgtatgtatatatgtatacttacttctgttagatctatctagactggtggatacaattttgataaatctaaaaaatctaaatacagatcatcagtaattgcattagacaaagcaggagaagtagtagtaatggtgctagtaatactattattcttaggtatgatatcattcttctgaaataaagatgatggtgatagagtcgagagtgacgactcctgattgaaatctaagtaacgatcaagccatgagttatcatcttggatcatattctgttcgtcatgtttattctgtacatctgtgatagatgggataatagtggtagccatagattttgtatatgtattagtactatcaaataatgaaaacatctcatcatctagattatatatggtcgtattttggttcgtatcgaatgtgtagggataagtatttattatattagctgtagagaacaatgatgatgataatgctgaagagaaggttgaggaagaagaggggggaggagaagaagactttgcggtttggtattttaagttttgtactttctttttaaaaggtttaaacatgtcagtaaaatcgatttcatctaaattaatcatatcattctttgtattggtaatgttggtagtaagagtggtattagttatgttgttactattattattatcgttgttgttgttgttaaataatatagatagagaatcatttgctaatgtatttttagatgatatcaattttttcttggaaacaaaattatttttgctcttgctattatttcgattgatatcagatttgtttaaaattgaaggctctggtataattatattattaaaccaattgatttcgttagtcaacccacaatcacatgtcacgatttgggtggatggtgaagacattggtaagttgaatttcgttttatattccaattcttcaaagaatttcatagtatctttatccttttgcaaatataaataatttttaaattttctatactcatctgtggatggatcgaattttaattcatgtgaatgaacgttattgactatcaaaatgttccattttttcaattttatcgaatatgtggctctaattctaaaaggacagaaagacttgctgctgctaccgcttctctctgtctttgttttttcttgttgttgccgtttggtgatacttgacttacatttgaaaataatcttactgttgtctgatctttcaataactaaattgatgccttgcgggaagaagcttttttgtagccagaatttaatttcattacggtctttaaatagaggcactggatccagatggattaatttattttgttctctaattagggcattacttaggttgtttggagaccaaatagatcttggttgtctaaccattttgttattccttactttctctataaaaaaaaaaaaggaaaaaaaaaagaagaagaagaattttttttgacttatgtgtctgtataggagtactgaatgaatatgggtttgaagaagtaataatatttggagaaatatattacaaccttttcttcatatcttattcctttctgttttttaaaaaaaatttcttgtttaaaattgattttttttttattttcttctagctttggataggaagcttgctctcttgtattgttgcttaatcaaagattactgtttaatgaaagctggaagagcatgtaataagacattaaacaaataattataatttttatcaccatagcgaaaagaataattaatattttaattactcatcattttcttctgcactgagtcattttccacgtctcttgtttgatgtcgtttcttttttctttcttttttttttttgatgggcggagacggagagacaactctacgcccacagtatttcgtgaacaatgatcacaaaagggtcggggattgtttttttttgtttttctgttatctatttaggttttgttatggtgtggatgtgatgacggctgctgagtaatgaatattacgttatgagctggggagagagcgtgtgtggaaagaaagaaagaaagaaagatgttgtaattagacgagcaggttgggcggctagatggaagagacatacaaatatacaactttataaatatatatatagatagatatatagatatagatatattgcctgattgattgataaggtggtgagaaggttatgggatcaaaagagtgatatacggttgaggttttttacactatattaagtgatgttaagtttaaaagatgatttggatatttggaaacatagatgtgattttatccaaagacagacactaactattctaaaacattcttatgatgttacctctgtttctcataaacggtcctcgttatcatatactctattgttatcattatcatcatcatcaaatttgtataacagcactctccttccaatatcacaaactgtttggttggacgtaattatatcattatatagactgactaaagatctagagtttctgtcaagacaaataaatatgataaatatttatgaaatgcaaaagtgtagtactatcactggtaatagtagtattactactacatacaaatgtattttcaataaaaaaaacacaggagacaaggatccaacttttctaataccctttcttctcatcattacaactattcttatgatgatcacattctattcataagtttgtttgtttgtttgttttcatttttcatttttcattttttttcacatgcaattgaattattattcagttgataacaacaatgacaatggcgatgaccatgacaatgacgattacgacgccggctattttctttctattgaaaagttcctatgattctgtttttcacatttttttgttatattaattgttgttttcattttgtatcggtgttttattttaatttaatttgatttgatttagtataatttttttttatgcacaaaaaagagaggggccgagaatttggtgtggtgtacggctgttatgtattgatttcgcttgtgtttcgttccattgctgtttgttactgttattgttattgttattttggttttgggtttttgtcttcctcgaggattttgttttttttgtttaacaaaagacatcaaataatcaaataatcaaagtgcaaacagatatttatgtattattatcatatatactcatttgaacttctacatgtaatacataaacttttacacatacgtatgtatgtgtgtatgtatgtatgcgtgtttgtgcattgtcttatattataaaagaagtgtccttagtagtgcagaaacaaggaatagaatgaaatagagtcaaaaaataaaaaaataaaaaaaacaagtggtttgttatagataatataaaataatacaccattttctctgtttgcccttttttttttttctttatcatatcttttatttatttatttatttatttatttatttttggaacttataatatatatatatattatatggatcagtctgatcgcgtaattgattttttgaaatgaataatgttattgatagaatctctattgattcttcactatggaacgatactttacatcaaagaggtagtttggtttataatgacagtaacagcataataatagtaaaagaaaataataaagcgttttcaaaagattcaacaagcctcaagggtgatttcaaaactaccactggtgacaaaataagtgagaacggtgacagtgacaataatgatggtgacaacagcgatttctctgttcattatgatgataatggtgaacctatcttacgtaaatccttttctttgtggtcgatattgggtgttggtttcggtttaacaaattcttggttcggtatatctgcctctatggtcactgggatttcctctggtgggccaatgatggtggtctacggtattatcattgtagcattgatctctatctgtatcggtatttccctaggtgaattgtctagtgcttatccacatgcaggtggccagttctggtgggctttacaactggcccctccacgctataaaaggtttgctgcttatatgtgtgggtctttcgcttatgctggttccgttttcacgtctgcatctaccacactatccgtggcaactgaagtagttggaatgtacgctctaactcatccaaatttcaaagtggagagatggcacgtcttcgtcacttttgaattaactcatttctttttgatgttatttaattgctatggtaaattgttacccttgatttcatcttcatcactttacatctcgttaacctcctttatctcaatcacaatgactgttttaatttgttcttcgggtcactttaatgattccaaattcgtctttgctactttctataatgaaactggctggaaaaatcatgttatcgcgttcattgtcggtctgattaaccctgcttggtcgttttcgtgtctcgattgtgctacacacatggcatttgaagttgaaaaaccagaaagagtcattcctacagccattatgggcaccatagccattgggtttgttacctctttctcctacgttatagctatgttcttctctatccgtgacatgaaaagtttgattgcatcaaccaccggtgcacccattcttaatatatacaaccaggcattgggcaatcaacatggggctgtgttcttgggctgtttgatcctgttcacctcatttggttgtgttatcgcatgtcacacatggcaagcaagactgtgctggtccttctctcgtgattgtggtttgccatattcaaggatttggtcacaagtgaacccatatgtcggggtcccactgaatgcccatctaatgtcttgtggcttgatctcaatcatcggtcttctatatttagcatcatctaccgcatttaactctttgatcaccgcgtgtatctcattcttactgttgtcgtatgtggtccccgtcatctgtttactttttaaacgtagaagaataagacatggcccattctggttgggaaagatcggctggttctctaatttcgttttactaggatggactctgtttgccctagtcttcttttcattacctccagtcttgccagtggatcgtaacaatatgaattatgtctgtgtggttatcgttggttatacattgtattctattttgtactggaggtttaaaggtactaaggaattccatctggaacaaggatatgatattgaaaagaaacaaagacaggaacaaacacaagatgaagatttcaatgaagatgtatctgtttcaggtgtcgtgaacagtctttgaaagcgacttgttagattttattttattttatttaaatttatttttattttttgcttcttcttccatttttttttttaagaaatctatatgtatacgtagcactattatttctgttattatttatatttgtatataatatatattctgaatgatgttttattttggtctcacagcaacctgttagctatcattactattattttatgtatgcgggttttgttaattgatctcttctttttatctttgtctcatctgtgatctatgtcaaaatatgaaaagagaagaagaacttctttcttcaaatttatccatttatgaatacataaataaacacacacagagacaaacacatgcatatacatgcatacatatatgcgtatgataagttaataaatatttctttttttttaaaaatttagatagtaacaccttttgtttattctcaccaatatatattatttctaatgtatactaatatggttataaggacagcatggaataaaatatcaaaatcctggagcacgacaatcgattcatcaaatgagaaaagttccatacgtaatagttcatcaaagagatcctcatcgaccattaaatcaaatgacaaaccagatactgacttacaagagtaccgacttccgattaatttacttggtttcacctcaactacaagaaacagattacttaccgatgaaattggacatgaattaagaatattatttccttctaggatccaactttacacagattggactctgatttacagtttagaacagcatggagcttctttgcattctctgtatgggaatatacacaataccatagttcctaaacgacgcgttggatatttgattattattagagatgcacgaggtggaatctttggtgggtattgtaacgaaccatggttacctaacgagcatagacgatacggagggaatggtgaatgttttctgtggaaattggtaagggctaagaatattaatttgggtaaacaagagcaaggagttttatcagagtctataggaagacatattcaaagacaagatagctccagtgttgtagggtggagactagttgggttccctcatacaggtgttaatgagttcactatgtattgtacctccaaatttctttccatgggggcaggggacggccattacgggttatgggtagatgatggtttattgactggtgtctcttaccattgtttaacttttggaaatgaaccattatcacaagaaggcgaaaaattccatattacaggtttagaagtttggagaattggaggaagataatattatctagagtgacaaactgtaaatttggcaagatattcaaagagtatttgttaagattagtcactttcttggttgtttataaatttatttatcaattgtccataataataatgataattataatgatctgggaaggtaagaggaagatgcgtcatgtacatacatataaatgtacccatccatctatatatatgtacatatatagtcaattttatacatatacacataatatgttgaaccattccacgctacagaatccttctttgtcatccatactttcctctatatatatagacattattttgtatacatggaataaagtctttgtcatgtttgttttattataaattattgaatattctaaagaaatttgaagattttgtaaacctttcctttttttttttttttagattaagagatgtacagagatattgtatttaaacagtaaatatcaagtttgtaaatacacgtatatatcaatatatttatatatgtatactctagtaacattgttcttttattaggaatctagagtaaattattcagagtattatattgttgtataagggttgacagttaatggatttacatagagataaagtacagaagatcagaaaaaattaagaaaaaagaagcagaaaagctaaatcaatttggcagatatatgtattaggtaaacatgagttttggtttatctagtaacaatgcacctactgcagaggtagtgaaacaaagattgagaccatttgggatcttttttgagaaatctttgaaagatttaattaaaggtattagatcacataatgaaacaccagaatctcttcatacgtttttaaccaatgaattggtacaatgtagaaaagaggctaattcatcagatatcaatttgaaggctaatgcagtcttgaaactggcatatctagaaatgtatggattcgatatggcatggtgtaatttccatactttagaagttatgagcagtgaatccttacaaaataaacgtgtaggttatttggctgcatcacaatcattccatagagatccagatatcctagtattaatgaccaatctgttgaaaaaggatttgaaatatgctggcaaagatgatatggtcaaggttggaattgccttaaatgctatatctactattattattacaccatccttggcaagggatattgtggatgacctatttctgatgctcaatagttcacatgcttatattagaaagaagactatagctgcattattgaaagtttttttacaatatcctgaagctttaagagacaatttcgataaatttactatgaaattacaggataatgatatatcagtagtatcagctacagtaagtgctatatgtgaactctcaaaacaaaatccttggccatttgtccctttatctccattgttatatgaattattactaactgttgataataattggattattattagacttctgaaattatttacaaatttatctcaagtggaacctaaattgaaatacaaactattgccgaaaattgttgaattgatggattctacaatggctacatcggtgttatatgaatctgttaattgtattgtaaaaggctcaatgattttagaagatgattacaatactgctaataaatgtcttcaatgtttaaacaaattctgccagtcacaagacccaaatttaagatacattagttgtacactgttttataaaataggtatagttaattctcagtttgtgtctgattataatgatcttatattaaggttaatatctgatgtggatatttctattcgttctaaagctttggagctattgagaggtattgtcaatgagaataatttgaaattagtagtgtcaacattattaaaacaatttgtgaatgaagaagtagtaattttgaacaataatgggaatggaaggggtaatggttcaaggaaggaatttccaattttaataccaaatgattataagattaaaatgattaggacaatcatatcattatgtagtatggaaaattaccgtaatgtaacggattttgaatggttgaacgcacttttaattgacttaactatagtctcgcaggacttgatagaggcaagggatgaacttggcaaattaattggtttacaacttaaatcgattatgattaaggttccagatgtaagaaatataactatttcatcgattatcaaaattttgacgatgtatgatatcgagtttaaattgccaacagtgttaagggattgtatttggtcattaggagaatattcatcattaattgaaaatggagaggtaatgataaaaatattgattgataagtctactagattcaatgcagatataaaggcaattcttattccttcgatattaaaattgttatctacatggtgtaatagtggtaatataacattatcagaggttaaagatgtgatcactataattatccaatttttaaatccattaatttcaaacagtttatttgagatccaagagcgatccattgaagcggtggaatttttaaatctagtagctcagtcaattgatgaattggaagttgaacagaatgagagttcaaccgaactacccatgctattgactgatgttttaccaagtttttttggtgggaatgaattgagacctattgctaaaggaacacagcaggaattacaaaaaaacttgacacatgattatttagaaactccatttttatctagtgatgattggaataatctttttaaacaatatgatatagatgaaggttgtattactgaaagcacattatttgatggatcatctgatgaaaagtttagtgatagggatactttttatgaaaatgattattctgaattgtcatctaatgttgaagataaggataatccctttagtaattacaatgatgatgcaacaataaaaaatagaaaggaagaacaattatcaaatccattttatttgacagaatctgacgataaagcgaatattcaagggaatgatatatttgagcatcaagaatataattcccatgtagatgagctggtgactattgtgaaagttaaaaatactattactccaagcgagcatgttgcacaatcaattgaatctgaattaattactaccagtaacaaggagcaaaagaaaaaacataagaaacacaaaaaattaatgaaaaaggtcaaggtacttgatgatgaagtgattgttcaaccagatcaatcacaattggaattagagtcgaaaaaatcaaggtcactgtctccaattccaaatttatattctatgaaacctagaaataacaatggtatttttttacaaacaaaatcaaaattaggaagctttaattttaataaagatgagatcaacgacttgaatgttatagaaagtgagcagttagaattggataaaataaggcagaggttccaagaacagagtcttgaagatcagtcaactatgaatgatggtgatgaggaagtaattatcattaaaaagaaaagggataaaagtaagaagaagagtaaaactaaaaagaaaagcaaaagtaaagatgagataaagcagatagaagctgatccagcaggtgcaattgaagataagtgaaataaaggtgtaattttttgagatattataattgtttcatattttggtatatatatttatgagtgggatgaatgagaagatagatagctagataaataggtatatacaaacattatcttatttaaattttacttgttttaatggggaataccgttatttatgttggaactttgggtgatttatttgttcaggtatatttttgtttcttgttcgtttaatgtttctttaaagggatttatggtaatctatctcctccacttcaaaaagattgaaaaatgttgctataagtaagatagtaagacgtaaataggcctataagaaactattggaattagaggatgcctgatatagatgaaataatcctgtaactgaggattcaaaataacgttcctggttatatgagcagtagatagtagatattgttagttttttcttattttgccgctaataatttgacattaaagatgtcattcagagctactattgattctatcagcaaacataacgcatggtacagaggaatatatgtattaaatacaattgacgaaaagattaagatcaccataattgaaaattcattgattttgtgggcagtccataacactggatcatcatgttgtcaaattatttatgataagtctttttttaaagattttgaatttaagccaaataatgttgtctttggtgaggatggattgcagacagtaacagatttacatggcattgaacataaaatattttcattcgagatggatgcaaagagtcttaatatggtatcaaggaaatctgataatgatgaaattaaagaatttactatatcaatagataatactacaacatgtccagatagccttatgaatagactgattgttactatcactatgcagtctctaattgtcaaagatcatacaccactgtttactccgattaaatttagttctaacagattggatttacaatataagaagaggcttttggatgtttatggtgatactatgtatgacaatgatgaattagatagatcttttgatcctgcattagttaaattatttaagcaaattgaaagggaattatcacagtctatatttggtaacattattgggcgacatttgattagacgtgtgaatgatccatctcagttaactgaagaagatgaaattaattttattagttgtaactataagttaattaaaaattttgttgataattgcaaaagtaatgttattaaggatgttaagatggaattatttgaaaatatacttactttgactggatcaagaagtgatttgaagaatagttcagaaattcttcagcatggtattattataagtaatactattgatactaatgatttgggtccatattgtatctataatatagaggaagatgaggaaggggaagaggaagggaatgtagaaacaagatttcgatcaaaaggaaaatatgataatcagaaagataaacacgttgatcagaaaaagagacacaaggaagtaaaaccatctaagaaaatggtatttacattaaaagattttaaaagttttattaatatggctacaatatggaagagtataggtacccctcatggagtgcaagaagattcaaataaagaggtaaatatatggttttgtcgtcctggacagccaattttgtttcaaatatctaaaccgagtattcaagcttctttattattacttacagacggttctgaaactaatattagtcaatcaataggaacacatttttttgttgaaagacaaagtccattgaaacataagaaagaacactctcctcaaaggatatcaccgaataaaaaaagatctattatacctgatttaaatccatcgcaatccgtaaaaatgaataaggattatgatatttcgacttcaactatcgcaggttccatttcaaccagaattcctcgtttagatctattagagatacgtaacaatagaattagtccattaaaagtatcgaaaacaccattaacgaaagtggattctccgttaaaaggtgatatctatgaaaatagtcggttatatcgtcaaagtcctagaagattatttgttactgatgataattcacaagaaggttctccacagaggatgcaaacaggattaacaggaatgttcccttcgatatcacgtacctcttctactttatctgatcgtggactaagtaaatcttcaaagccaagaaatgagacaacagatcatgaacagattcagagaggaaaggggataagaaataattttgaaagaacagatactattgtgggatgggggagatttaaagaggaacaaaagtgttttaatgaacaaaaaccgtttggaaagattagcagagaatcatctatgaaagaagatgaaatcgatcgtcaaagaattctaagacaagaaaaaatgaaatatgtcaattcaaagaaaaagtctactgataaagagcaacataaaaaagatgagttatctatatcattagatgacaacttaggtccaacccaatataatcctgttaaggggctttttgaataatgtatctgttttattaagatttacagtgcttacttgtttaaagatattaattagaggttgatacagaactttttttatgtgttacagtagaactataaatagcggtgctgatatgtttaactaacatcttgtttggacatgtccttttctttaatttatcttttgccttcttccagtgttggtgatcatctttttaaaataaattttagaatttaataattgctttaatatatgaaaaaatctatagcggaaaattaactggaaaaatttttgatacttaaactcacatctatattgacagtcaattagaaataaacgatagaaatcatcctaagaaggttaaaagatcatcaaggtcactctatttataataatagtatgaataataacaataatggcaatttacatggtgttccaagaccaagtttttcgggtacaatcggattagataagggtggtggtaataacaataaaaatagtagtagtagtaatgatgttagaaataatgttaagaagcatgagctattgaatgacaagtatattgtagaacaagaatcgaagagacaaaggtatgcagaaacaaatatgtttgggtattacaattatgataatagcaataatattaatgataataatggtgtaaattatcgccagttttatggccagccaaattcattttataatcaaccatacatgtacagtactatgaatcaaggttatcaatattttgcaaataattatggacaatcttattatgagggctatctaaactctatggattcagtacaacatcaaaattatataacgtacaatcaacaaataaattcttatcatagtgataattatacagttgctcccagtaattctatcaatttgattagttataaggatatttattcaaaagaaatagtacaagaagtgaaaaataaaaaaaagtcaaagaaaaataaattgaacaagaataagagcaatagtagtaatgatagccaagtattatcggtcagaaacatgacatcgcagggtattcaaaaacagcctattaagaaaaaaatggatgcaaaaggagttgaatcttttgaagaggagactagtgatgcaaaagatgatatgttgaaagttaaaaatagacttgaagaagactatgataattctgattctagtaacgaagattttagtgaggaagatgtgattaatgataaaactgaagatgagggagcaaatacttacagtgataaagtaaattcaactaccattccaattcctggtacgtcaattacattagtaactgatgaagatatagcaaaatggagagaggagaggaagaagatgtggttgttaaaaatatctaaccgtaaagaacaacatatggaagctatgggaatcaagaaggaggatttgaataatatgggtagtattttaagagaatctaaaaaggagagacaatttattcaaaatattcaaagtcaggttaatagatttaatcctaaggtgaatttaaatttgaagtttgttcaaaaggaaatgttgcaagataacactaagttattatcatttattaaggaacttggtgattctggactattagaatatgagttgacagaaaaagaaaaaaaagtcttatttggaaataatcaagatgaaaataataaacaaaatagccataaaaatgttggtaataaaaaagtcgacaaaataaaatacaaaaaagcatttaataataataatcgaaatggtcctattggtgataataatataaaaaaaagttataaagaatataaaaagtaatcttgaattttattatcaagtggtttctgttaaaaatttcgtgattgcactagatatgactgctccaaggaatgatcctacaatagcacccgtatagaatgaatctgatttgtgtgttataacttttgtaaccttattgacatttttatgtttcttttttgctgatgttttggatggtttatgaattttgtttagtccaggagaaaagcctggtttctctattttgttttttggataagaaattatatactctctactactgcttttagaactaggtatttgactaatagacttattcttttcaataccttccatctgattacctttacatttagtatgattagtgttaactctatcagtctcatttttgcatatttcattgtcccttgtagtattttttatgattgattgttctaaaatacgattcttcttgtcctccattatgtcatctgatttcatttcgggttaattagtatgttttgggtttgcatggaattgtttctgtgtcaaattgaaatattttgatgtttccataaaatgtttgtttaaaagtcttctgatagggtcatttgtaggtattacagaaacttcactattctgatcagagcatggtatactactatatatatgtgtgtatgtatcgttaattgcaccgagcttttacattctagaaactcagtaattccattttgttcagaaattgtaataattgtgtttcataattcaagtctttgttccaatgggtgtttcacatatatatatatttccaatatgattctctcagactatggtacagttactgtgaacctttgcagttcttgttttatctgcttgagtgataatagatttctgtttactttgtggtgatattttactattttgcatagttttagacttaagttgtaatctattttgtgctctcctttgcttcttagagagttccttagctactctttcatcttccttttcctgtaattttagggcatattttttatctttctccagttgtgcctcaccttctgtgatgttattgttattatcgttaggatgatttatattgaaagaagtattgtccttggtggcgacagtcatttctaacggtgattcattaaagtttccatcaaagaatacatcatcagagccattgatggtgattagggattgccaaacaatgttcttatattttttaaacccaatatcagtcactaaagtatacaatatatcattttttttgtacaatgtagagaaatgattatttctgaataagatagtaaattcatcatttgagattgtgttatataaatatgataagccaaaactagataactgggttggattatcatgaagaaaggattgtattatcttggctttgggttccattttcagatcattatctttcattaacataacttgagcttcttcataggaaatattgcagagatcttcgttggatgagtccataatccaaccatggaccaagcgagcaccaaatatctcaaatagtttattagttccttgattgctggtagtgaattctccattaaattttagatttacatttaaccccttgtgtaactcaggtaagattgataaaagactatcaatatcgttgactttactcttttgctcttgagttgttattttaattgcaacatcagccagaatctctaggatgtcatgcagttgaattgaattgtgatcatgtactaatttgattaaatctttgcaataacttgtgtaatgagaagataaaataaaaatattgaccagtgctactaaagcacaaggaccattttcattttgtaataaaatcttgtaagatttattgtagaattcaatgaatttggtttcgaaaataaggtccatctttttatattaggttagtttacaaggtattgtaaacctataagtacagtaaacttgtagacatagtgtttgacaaatggacctagaatgaattgttattttttttctcaatattttatctttaaaaactcgggaactcataatacatcttatatgtcttatatttagaatatacatagtaataatttatacaaggtaagcatacattcaagcattagataataagaacgatttgaataatattatcaatatgtaaatttcctgtttttaaagcatacaaattatactgtattaaaaatattagttgtttacaataaagatggatattatataattagtgatagaaataaacagtgatttcaaagacatgcaaaaaactctgtagggcgaaaaggaataaaatctcaccgaatgaagaaaactttaagatatgaatgatctatattttgtttcgtaagatagtttcttatttcccaaactttatttttggaacagtgtaataagcatttgtttttattagaacaaagacacatggagatgaagatgattaaaagaaaagaaagaaaaatttaatgtagtgagcttaagatataataaggatagtaattggttatttcattgataaaaaggtttatcaatatatttccaagtagtttaatattgaacatgtagtgaacagaaacaaacacacctaagagatggaaagatgaacacgaagagagaaaaagagacgggaaagatgaaaaacaagaatttgatataacttcatttcaaatttaaaaaaaaataataatagaaataactggcatagacataaagagaaatctttaataagatagtgataagaaattttttattgaattcatttctgtagtttagctagactgtccaataaactttgcacattactaccaggttgttgttgtggtggtggttgattttgtggttgaggttggctctgcatcttcgaagaatcgtaagatgagctaccacccatttgagaataggtattttgtggttggtgggtttgttggttttgagtattttgtaacatacctaataattgctgttgttgttgatttggtggctgctgttgttgttgagcagctgataataaactcgaaacaacatttggtggcaagttttggatggcagcgagtaattgttgttgatccatttgagttggattaccatttaaagcagcagaaagctgtggctggacattattttgtggtggagattgtgtaagtattgattgttgagagggagcagtacctattgcagccggagtttgattgactgcagaagtttgtggggggtatttaccataagcttggctcatacccatcgaaccttgtggtggaggtggtgcaggttgattttgataacgtgaataattattttgatttattccaccatagacaggaggttgttgttgaggaggtggtggtgcttggtatccattggtgcctggagcctgataactcatataaccttgaggtggttgtggtatttgttgtggagggatactaccataacgagaaccatatccatacccggcatttatatttggacccattggaggttggttataaccaccatacatatttgcactacctggcatcataccaatgcccatagtacctcttctctggtttttaatgttattgaaaatacttaccgcatcagggcatgaaatattaacatattcgtcaaatttagtttcaccagatggtccttcataaaagatttgaatatcaagattacgagatttgttaacgataatgaccccccaagaaccatcgtaagcagcatcgttaatcaattttcttaattccattcttggttttaaaaatatcatatcagtttcaattcctgtaccgttcttgatactattgaacacttcagtagcaaatgttctatcagcagtccttttgacgtaaatgacacagtgtggaactcttctttttggttttttgtacccagtaccatcattatatagatctccatcatcagatccatcagtttggaatggtctttttgaagaagagatgaaagtagaactgctattagtaccgtgatcaccatgatcaaattgtggacgactattagagctcgacacttcaaggattaatttcttgccaaaatttatttcatcagattcatatttaatagcttctaagacactggttggattatcgtattgaatgaaaccaaaggcatttttaatgttgatttgtagaatatgaccatagggaataaaaattctgaaaagatcttcctttgtaacattctttaaaggcaaattaccaatgaataatctggatttggctggaatattgtgcatttcagtaattttattctcaccacgcaaatatgcagcatataaatcacgttctttcaaggtcattggcatagacaagttaggtctttcatacttagatgcaggtttgtcctttgtagaagaagtagacgatggcttactatcattagaatagtccaaagcttgtttgttatttgatgctgatgaggaaaatgaggaagttgtggttgtggttgtggattgattctgtggattattagaatttttcgtataaccagataaggctgtttccgggtttgaatttattaagttaattatagctgtaattttaccctccttagataaagctttaaaatcgtcagagtgtaacatatcactatcaaccaaatatttgatttgtctttcaagaaggttaaaatttacgtctttaagatttttagtatcatcttttttttcctcagtgtctgcttcttcagtatcttcttgctcttcgtcctcttcctcatcatcatcatcttcttcttcttcttcttcattgtcgtcattatcgtcatcatcgtcctcaccttcttcatctgatccagatgtactctcagaatctggacctgagcttgaatcagatttttctaatctgcctgcctctacatctgtttttttattattattctcttctatttgtgtttcttgttcttgttctttatcttcatgttctttagatgtagcatcattttctttatcagataaatcattatgcatgtttaattcctctcggtgagtctctacaatcgaatattcggcattggcattgtcattgtcattgtcattatcattattgctattgtcattttgatcatctttttcctcttgttcatcattatcttcttcatgagaatacaaatcatcgaattcactgcctgtatcaatattttcattgctgtcgtcaccattatcagagttatgatctaggcttgtattgatatcgttatcgttggtttggaagactggttgtgtcgaaccagtaatgttgtcatcggacattttatctatatatatatatatatgtgcgtctatgtctgtgtgtgcgtgtgtaagtagatgaatgtaggaatacgaatgaaaaaattttttagcgtttttatggactcaagagtagtatttgagaattatttcaatcaactatagaagatataccaaaaagatagagatgaggaatagtagattatttgaagtttgttagtttgtttttgaagtgttcttagacttgttgtttcttcctttgcactctctaaaacataacagggaagaaaatttttcttcggtttttgttccttcttcatttatttttgtttttttggtgttgtttagtaatttaaacaaaaactgtccgttttaggaaattataaaaaaaagaaaaaaaaaaaaaaagaaaaaaatgcagtcttttttttgggaggcgataaaaaggttccagatcgttactgagtaatcatatcaggtatgagtaagcatagtgagttatgcagaccttcgagaaaacgaaaaaataaaaaaaataacaaaaaataacaaaaaatctcgaggatttcaagaagttgtaaagtatttcgaatagtatactaaaaataataataataataataatggtactctatttcacttaactaatattgcagatggagatgttttgataaaagaggaaaagaaagagagagagagtgtgtgtgtgtgtgtgatagagacgttctctttttttttttcttgtagtttgtttttttttcctttttgttaaatgattaagattgttaataaacaaaattcctttacctcaaacaaattcatattgaaaaatatattacaaagagctttaatgtcatcatcttcaacaccaccgtcaaatcaaagcatacaagggccggcgattacttcaattaagaataagattaaagccagatttcctaatgctacccactttgccatatttaatgattcttatttacataaagggcatggaggcattatgaattcaaggagtacatctgagagtcatgttaggattgaactagtcacggatgatttcgaagggatgaagttaccgatgagacatagaataatatacaaattgattcaagatgaaatgcaacgatataatattcatgcagtacaactgaagacaaaaactgtcaaggaaatggccaaagtatcgttgccatcatctttatagtctagtaaataaaaaaaaaaaaaaaaggaaaaagaagaatagaaataaaaaaagtcagtatgataaaatattatcctattgtttgctactaagaggtatttacatctacatatatatgtatgtatgtttgtgtatgcatgaaaagtattcttgtaaatagaaaaatatataaagaacagtagataaaactttcaaatctcttgttcttgcctttatttctattctgctttttttttttttcaacatattcaatgtttgtattagcattgctgaaaagctattttttcattcgtttacttatgatatatatatatatatgtatatattggtgtgttagttgagtttaatgttcatcagcctttaagaattctttgtactgttctaaactgaataattcatccatttgttccttactctttgtgttatctactttaaatttgaccatccaacctttacccaatgggtcagagttgatcaactgtggtgaatcttctaattgggtattaacttcagtgacggtaccgtcaacaggcatatacacctcagaagcagacttgactgattcgacactaccaatagagtcaccagcttctacaatttggtctacttctggcagttctacaaaagtggtatcacccaatgcagcagaggcatagtcggtaatccctagaaacccggttccatcaggatgtaaagccacccattcgtggtcctttgtgtatttgacttgttctggaccctgtggagaaaaagtgaaaggtagttcacttttgtttaaactgttccttgagttattgatgtatcttgtggaagatagccttcttagtgaaagtatcaaacgtggagtcataatagtagactgtctgttgattaatagattggtgcagtgacgacgacccaacatgatcacttgattagtcatatttcttttcataacagtggcaaaggacattcttacttatatgtgtatgtatatatgtttgtgcgtgtatatgcctaggtttaagtatttaagtatttattttttttcttgtggtggtattgtgtttgaactaagtagcccttttgtgtctgtgtggtattgatattgccttagatatagactagaaacggactaataaagtcttaaatcaagtgatacgtatatgtctgcggtttaaaatagaaagctgatagagatataattaagaattgaaggattcttttttatttttttcttttttcaaggtttctcttggatctatatatgagccatgggagggataaagaagacacaatggaaactgagcaacactccacctgtccaactctaattttttacattccaaccccaacatctgttgactatctctttttcttcctgtttcttttccttttctttctccctctagatctgtgtatgtgccatgcaggaatctgaacttatcatcgtttctgaagtgctgctggtaaggaagaaatggccacaaatttttgggtggcctgtgatttgtttacgcagaggttattcggtctgggtgctgtgactctttccagcgggaagagtggggggaagaggaaatggagagcctgagtcaggtgaaaaaagacagagtcagagtcggagttagccctgcacgtgcaagatgacagacttttttgttcatacaagcctgagagtcacttttgtcgctgtcaacgaaggttgcagcggtcgtgcgcaatgagaaagtgtttgagctttgtagaaagatagaaacgtattgtctgtttctgtctatgtcgccattctcttctcttggtttatacaatcgctctcacttatttattcaactgttcgtttatccaccactcattcttctattatagaagccttttgaggaattgttatctatcttattttccgtcatatgacggtccatttgctttattttttaatatatatatatgtgtgtgtgtatacgtatgtacatacatgtgtgtatgcgtgtttctcatttaatctttgtagaacttgtcgagtattggtttacattgtggttccactgtagggtcttcctttagtatggtctccaagagaggtttgatcatggctttcacaggtagtctaaacatgattaagaactttaatgtctgaaatcctagtgtacttctgcttggatcaatcaatataggtttcactctagctaaatgctcacttctcaattttggcaattcactcatcaatctgataaataatttacgatgcttattctctaaaaatggtatcaattcatctaataacctcaacgaccagcacatatattgagattctgtgtcctctcgtgactcaaataacagatctccatgccattcctcgttcatccactcaattataatagccgtacgatgactgtcattaatatccatcataacatatcttaacaattcttctctgatgaaattactcatctgtaaattcgatctggtccctctagtggccaatcttatcaaaatatgataccatgattcatcgttagaccaattgagtaattttatctgttctaacgggtttttcgacattgggatagaattgatatggggtgatatcttgctggtttttatactaaacaatcttttgacaatcctttcggtgattttcatcttggtgtcgttatccatcggtttgggttcaaagaaatatggcttttcaacaatcatctgcacatcttggtcctcatcctctttcccttcgtcttctccatctaatactgcttcactggtctcttgttttaccaaggtggaattattattcagtcctttgtcttcctttaaatcagttttaatcctttttgcttcactgctgctattactattactattattattattaccactattatcatcctcaagttgtcttttgtcaccaatcgatgggtcgttccggttcatcaaatcggtgtatctagatgcagcaatcgataaggcagcgattatttttctagtgtcagccttatatagcgcttcagtagataacttgatcaagacattggatggaacctttgataaatcctgtttggatccattattgtccattaatgcaaataaagaattgtatgtattatcgtatgctttcggggttgtattgaaaaatgacgctgaaggtgttttccctcttgaatattcttgcaattttgttaatgcattcatttgttcagtcgttaaaaagttatcaacgttatttggattactgttatttgggtttatagtaccagacccattgttattgtcgttattcaaaactagcatgttttgtgtttgttgactttgttgactttgttgtctcttttgagttctaaccattattatcttttctctttcagaatctgggattcttttactcacactttcagaatcaaaattcaaaatacctttatttttggtctcttcacctataacaaataaagtttgtgagatcttagataatttaggatagatttgattccagtttggattggaactattattcggatttttaattaaattatttttgatcccaaactgaacaaaatttctatagcaacgttccacaaatcttttacacaatttgtaagtcaatgtatccatttggtcattttgatactttgcatcaatattaaacttcaagattccgttcaagattttcattgttgtctggtttctttgtttcataataaaggaaagacagttgataataccgataaataatgaactgaccatcatcggttcttcaataagataatttatgataacatcaagtaatattctggcctctgtctccaatttgttcctattgatcaaaggctgattctctggaaccactgagatgtttatactcgagtttgttagatcaacagtatgtgtgatgataatttgagaaataaatttgattatagacaactttagacctatttgtttattatcaagatttaaatctagcggtgaattagtaatggtcatcagcttccattgacttaggatttttttcctgaattgttgtagtagagaccatttagattcatctgaagtcttcgctatcaagtcgaataacattgggtaaattttggtaaaagttagaattgtcaattgctgataatggagatcattaattgaatattcatagcatgaatataaagttgatagatattgtgacgcaattagaggtttttcatggttcgaaattttgttgtggttcattgtatccaataatagatttgtaaagaaattagataagttgttgttattatcgttgttgttggtcttccattgattcaatagcattgaattagtagtttccaaaacctttggtaacatttgttcgggactgttgtccatagctaaatctttagccttttgcaactgctgtaattgagattccatttcatttatttctttgggttcaaagaaacttctgtatagatagtcgtgtcttgtggtaacactgattgtaaaaccaataatattgttcgaaattagcacacactattgctcagagacacactctatctacacctttcttctattcatgaacagtggactcttctgtacattcttgctgttgttgtcgttgtcgttgtcgttgtcgttcctcccattttcctcttctttttcttcttctttcaagtgaaaaacaaaaaaaaaaagcttcgagagacagtagaaagataccagttaaaaaaagaagcatactcactaagacgaaaatgttagctaggatattaaactgaagtatagtggaatgctaacactaactctgttcaaaattatccattctagtattgtaaagctaagaaaataaaaaagtatcagaagaaaaataaaaagaataaaaaggaggaaggttaggatcatacaatagcgaacaatgttgaataggagaccaaaatcaagacttgtgtcattcgatgcatttaccaagacagaagaagatgttcgtatccgtacaaatacaggtgggttgattactatcttgtccatgattattggattaatgctactctcgcgagaatggtatcagttcaatgaattgagtattgtcccgcaggtggtcgttgatagagaccgtcacttgaagttggatttgaatttcgatattacattcccctacatatcatgtgatattttgacaatggatataatggatcaagctggtgaccttcagttagatttacttgaatctggatttacaaagactcgtgttgctgtagacgaactaggacgtatccatgacattgaatccagtgtggaagaattccaacctggtggggttaaaaaggaacaaaatgagaagagacgtgacaccagtgaatattgtggatcatgctatggtgcaatagatcaacaaaataataataataataataatgaaaacttagataataataataatagagagcgtgtctgctgtcaaacatgtgatgaagtccatgaagcatatttgaaagcaggctgggcattttatgatggtgcagagattgaacaatgtgaaagggaagggtatgtttcaaaaattagaaaccacattaatgaagggtgtcgtgtaaaggggaaagctaaattaaatagaatagatggtgagatccattttgcaccagggaaatcatatgaaaattacaatctaaacagaagaactataagtacccatgtccacgatacatcattatacttcaaatatggacaactaaacttcaatcatattattaatcattttagttttggttccaaagtggaaaatatagataagattaaatttcatggtgcaaagcaaggtaatggtattaacaacaagggtgacaattatgataatgacggtggtgccaatttatccacaatggttttaagtccgatggatggtagagttgtgatgcccaagaatagagaatctcattacatgttatacagttattttgccaaaattgtgcctacaagatatgagtatttcaatagtagaagaaaaagcgtggagactgctcaatttagtgtcacatatcatgatagatctttaagaggtggcagagatgaagatcatccaacaacattgcatgctagaggaggaattccaggtgtttacattagatatgagatgtcaccagtgaaggtgattaacagagaagcatatattaagagctggtctaatttcttacttggttgtattactacaattggtagtgtattggctgtggctactgtgtctgatcgcgtcttttataaggcccaacaaaaattattgggtaaaaaacgcaagtaaggaatgtgtaaatgtaattatagctaataactagatatttatacatatctatgtatgtatttgtaggttgatatacgtctctttttttttcttttttttgtttttccaattagattatgtgttagtttgcacatgttaaagatgtagtagcgtatataacaagtgttgtaggtgctttattttctttctcctggacttttattcaggagaaacaagtaaaattgattattttagtcagtattgatgttgtatcaacttatgtacatgctgatacatatctctacatacaagtacatggaagtgtatgtaatatataaggaggaagagctacgtttaacatggaatttacatttcagaaaatattttgtgaatggaagagaaatttgacttaagccctaatgtttatgtagaaaaaagtatttgataacacaataactctcttgtaacctatgttgtatggccttttctagttagggtttgtctaacttttttttctttttttagattttgttcttctattttttttgtatggcaaaggacaaaaaggaaggctaaaaaaaagttctcgagaaaagttaaaaagatgaaagaaggaagagaagacaagagaagagacaacgagagaagagaggataagcttctctggctgtcgctgtttgttagaaaaaaaattaaagtggtttctctatcaccgtagctaccaacaagatattatttcttgcaaattttttattaagcttgagtggcagactgattaataaatactgtaaattggcgtttttgaggtgctgtgattgtgagctttaatatagggtaagaaattcactttcttataataacagtattatcctagaagaagcaataacaggaaaaaattgataagtagaaaggaatatctataatagttacattctatcaataactttaatattctaaatatgccaccatccgctcacagttcaaggaaaaatacggttataaccagtcatacatcgatagggtcctctataatgatggcatcttcatccaataatagttcaaattcacatattccaaatgttatgaattcagcagttacttcaaaggattccttatactatgtttgtctgaacgtaaagaaaaggttggaatatgtctctcaattacagccatatctaaatttagcatattcctctagcgagttgttaagtgagagacaatctttattattatctcaaagacaacagcaacttctgcagaataataataataacgttaatgttagaaatagtaccaatagtagttctactccaactgcctctaggattagtacaatgtctacaaacagtatgagagaagagttttctttagatagtgggcctagtctcactaatagtacaaataacggtataatggaagatactctgttaactttcagtatgggtattctaccaatatctatggattatgatcctgtaactcaattatctcaattattccaacaggggtctccattatgtatcatatttaatttggtgaaaccacaatttaaattacctgttgtgtcgagtgatgatttgaagatatgtaaaaaatccatctttgattttattttaggttgtaaacaacattttgcatttaatgatgaggaattgttcactatatctgacgtttttgctaattctacaagtcaattgattaaagttattgacgtggtatctactataatggattctgcaccagagattttcccgccaaaggaaaagattcagatagaaatagatcaagacataaacaacaagatgaataaatattccaagaaatatgatgaatatactaagataataaaagagttcgttaatacagaaagaaaatatgtacatgatttagagattctggagacttacaagaatcaattattaaatgcaaatatcatcacatcagaagaattatatatgttattccctaatctatttgatgctattgatttccaaagaagatttttggtatctttagagattaattccttagtggcaccaacaaaacaaaggatcggtgccttatttatgcattctaaatggtttttcaaattatacgagccttggtctattggacaaaacgcagcaatagaatttttaaccaccacattagaaaatttaaacaaatcaaatattgaccaatccaaatttgtcattcgtaataaattagaattacaatcgttcttatataaacctgtacagaggttatgtaggtatcctttattattaaaggaattagcatcatgtaacattttatctggctcttcattgagtgacgataatttgaaaaatgcgaatgaaagagataataatggtaaatcaaaggaattagagattgctctggaaatttcaaggagcattgcaagaagtattaatgagaatcaaagacgtacggagaatcatcaagtagttaaaaaactgtatggtagggttataaattggaagggttatagaatagcaaaatttggagaattattatattttgataacgtgtttatatctactaacacttcgaatgaacctgaacgtgaatttgaagtgtatctatttgaaaagattattgtattgtttcaacagatatctagcaataatggaagcggaagcggtaaaagtaagacatcttctttgatattaaaaaagaaatcgacctcctcatctgcatcttcatcatccacgttgaatttatcatcacatagttcaagcttcctaccaggtggtctttcagggagtaataataataataatagtattggtggtggtggcaacagcaataataatgatggatatggaattcttaataatagtaacactagtttaattggagggtcatcctttgctaataatgagcccagattggatttaaggggccgaattatggtgatgaatttgagtcaaatatctcctatatctaatagatctctgggtattacatgggaatctataaaagaacaaggtaattttattttgaagtttaagaatgaagagacaagagataattggtgttcctgtttacagtctttggtaagaaacatgaagagtgaatcatataaaagtcatgctagtgaaacttcatttatctcgtcttcatcaataagaaacagtgatagtaacaatactactcttgttgaaaaattacatgatagtgtttcatcattcaataataattccataaaacatatctctgatatgttacctaaacagaagaaaggggtatataactttgaaaatgaatacagaacagtatcagagaactataagcattctatcccagagacatctattttgataaggatatcattcaattctgatttctatactatactaatggaattggactcgagtatggaggaggtttatgaaatgattttgaaaaaattgaaccatgttggtgagatctcgaagatcaaatatcaggatgaagatggggattatgttatattagcatcagaggaagattggttggttgttaaagatatgttaagagagaatgatgaacggatattgaatatgattgtatatccaagggaacaataacatgttaaataggtgaatactgtgattcatttgaaaaagtaagtaactttattaaatatatatatatatagcgtgcatgtatcgacagtctaacaaaacaacataaatactattagaagaatttattaaaaagaattaaactgatatatgtatgtataaattttttgtttattttatgtgtgaaagtttcaaagagatccattctggccaaaaacagaattttgtgacaaaagataaaaaaaaaaacgacaagaaaaaattgaaatttatagtagaattactactatattacaatatatatgtatatatatatggaataatgagaaatgataagcaaataacgaggacatttcgatatatgtatgtatttgctataaacaagtaaactatttacaaaaataaaagaaagagtgaatatgtatatatacatagatatctattcacctttcgtctttagacaatttagataaaatggctgaagtaaaatggttaaacctatctttaacattagtaaaattatctaaagcaggtctaacgtcaacactaaaagttggcattccattagcatcatccggtccaccataaaaatccaacacgtacctaacctgaatatacttaggttctgttgtgttagtgccaacgctagtgtcagtgttattgtttggttcacctcgtaaaacgatccagtcgtgtctatcgaaaggtaaatcaccatggaagtaccaagggaaaatataactcaagtaatggttaattttagctctgggagtcaatactccaggtttacccataaacttcaataacttcggttccaagtgtgtttgatcagtgtaaggtttttcccacctcaagatctcataccaacaactttcgtttaagaaattatgtatctggaccatagcctctactgtatcttcctgtaaggtttcatgggaacctatcttgccctttttcaccatggcattatacatctgttgagcggaaggatactcccatttgccttgctgttcaccacgggggatagacgagatagttttagttgtagtcagagacaatttctgaccgggctgtgtctctgtggaggaaaggtctttgggtatatagttcaagggattaagtccagctggaacgttgctatcatgactatactgttcttttgtattgccaccacgactgttattattactattactactactattacgcattacaggacatagtgatatattattattatcatcatcatctatattaacattattattattgttattattattatctctagttgatacaactttatcggcccaaaaccaacccatatttatttatttatttattttcttctgttgtataaagaaaaaattaaactaaactatgttaaattgttacggttattagggatacaaataaccactatattattagagatcaagatgacaggtagaacaagaggtgtagagtaagcaaaaaaaaaatataaaagagtcagaaagtcacagtacttaagaataactgtagtgctatgaataatccaaatcatatagtataacgagacattctgtaatatacttccaatcttattactatcactatcactatcactactactactattattagtagttactaccagtaaccagtagtaccactagtgcaacttcaagattacgacagtttcgatttcctttcctcctcgttgtaaaaaaaaaaaaagagaccggttccaacgataagaatcacgtgcgatacacgtgacctatccacccatccacccacaacatccactccgaaattgcagtccatccagggaaggaagaaaaaaaagaaatagcttcacgggcatcctgtgattagaagaaacccgttaagaaaaagaaagagagaaaaagagaaaaagagaaaacagaagaaggcaccgatagacagacaccactccacccagacctccgcagatcagcatcctcttaatttcaacgtgagagggttttttttaagaagcgagccagaaataaaaaaaaacaaaacaaaacaaaaaaatgtcggctggtggtttaaaggcatttttttttcttttgtgtcttcatccaagcattgcttttttttcttttttcgcttttgtttttctcttgtttttcttttcctttttcgacgcagcattgctatttctttctaaaatagtattaccatcacttattacccattactagtactattactattgcttattggcattgcttgttacttgttactattattatcatcaccatcaccatcaccgtttagacaacatttttatatcaacaatcaaatacaaaatatacaaaaatttacaatgacattcaccaccataacgtaaaacaaacacgatatgcacaaaacacaaaacacaagaaaacaaagcactctctttctctcccccccctcttctctatttcctctttcctccttcctctttctgtctcttcaatatatacctgtatgcacatgaaataatacacacacacacacacacacgaacaaacagaccacctgttacgtgcaaatatgtacacatgtacatacacctatttatatatatatatatacatatatataaagtgatgatgatgacttgtttcttgcacacgttgcctaccacttcccatccttccatcacttcttgctttcctttcatacaatttctcttccttcacaaacatattccttttctcctttgtgtcgcttccgtgttttctcttacttatatattacacttttccgttattctttctcttttacttcacttaccttcactttctatcttcctcttcgtttcttatcctctctttacaaaaagaatcgtgcaaacacaaatcaccttactttatcataatggaatccagattacaaagattaaccaacttacaagtcactgctggtaacgaattgagaagaacctctatcatcggtaccattggtccaaagaccaactccccagaagttcttgtcaacttaagaaaggctggtttaaacatcgtcagaatgaacttctcccacggttcctacgaataccatcaatccgtcatcgacaacgccagaaagtctgaagaattatacccaggtagaccattagctattgctttagacaccaagggtccagaaatcagaactggtaccaccaccaacgaagtcgactacccaatcccaccaaaccacgaaatgatcttcaccaccgacgaaaaatacgccaaggcctgtgatgacaagatcatgtacttagactacaaaaacatcaccaaggtcatctccaagggtagaatcatctacgttgatgacggtgtcttatccttcgaagtcttggaagttgtcgacgacaagaccttgaaggtcaagtctttgaatgccggtaagatctgctctcacaagggtgttaacttaccaggtaccgatgtcgacttaccagctctttccgaaaaggacaaggctgacttgaagttcggtgtcaagaacggtgtccacatgatcttcgcttccttcatcagaactgcccaagacgtcttaaccatcagagaagtccttggtgaagaaggtaaggacatcaagatcatcgtcaagatcgaaaaccaacaaggtgtcaacaacttcgacgaaatcttaaaggtcactgacggtgttatggttgctagaggtgatttaggtatcgaaatcccagccccagaagtcttagctgtccaaaagaagttgatcgctaagtctaacttggccggtaagccagttatctgtgccactcaaatgttggaatccatgacttacaacccaagaccaaccagagccgaagtctccgatgtcggtaacgctatcttagatggtgctgactgtgtcatgttatctggtgaaactgctaagggtaactacccaattaacgctgtcactaccatggccgccactgctgttattgctgaacaagccattgcttacttaccaaactacgatgacatgagaaacaccactccaaagccaacctccaccaccgaaaccgttgctgcttctgctgtcgccgctgtcttcgaacaaaacgccaaggctattatcgttttatctacctctggtaccaccgccagattattatccaagtacagaccaaactgtccaattgtcttggttaccagaaacccaagaaccgccagattctctcacttatacagaggtgtcttcccattcgtctacgaaaaggatgctgttgctgactggactcaagacgtcgatgccagaattgccttcggtattgaaaaagctaaggaattcggtatcttaaagactggtgacaactacgtctctgtccaaggtttcaagccaggtgtcggtcactccaacactttacaagtcgacactgtcgcttaaatataaataaaaaaattaaaataaattgatttttcttttaagaagaaagaagagagaggatggaaggaaaaaaatagatggaataattatatgataattattaaacagagataaactcttttttaaaatatatatatatatatattcatttcatctatttttccttcttttttttctttcttttttatttctaatttttttttatttttatttaaagttatttaattattatataccgttatgataaagtttatgttttatttataaagtactatttttttactttttcttttattttgacattttataatataactgtaaaagacgtctgatgaatctaactatcttgaattcttcacgggtgatctcttctatccttgtaaatgtctcaatgtgtctttattccatgtctttatttattatgaaaaaaagtaatcaagaaaagaaatgtatatatgttagttgcttatagatttttacagtttgacctttctgcttcacaaacactgtataaaaaacaccacttttcaataaataaataacagacttttactacaagtaaatcattttaactcctaaacctgaaagagaacaaagaatctggaagcaaggaagatgaaaaataaaagtcatataggacttagttatgcatatcgttacacacgaccacaacatgcaagagacgctgttgttgcagacaatcgttgtattatttttttaaggaaataacaataataacacaataaattccttggttgttgagattgttttttcttaacaattttgatcttgtattgtctatagctgcaatattatataatctcgcatttgatgaacaatacacttttgcaggatttctcgaaaatcctcatcaaaacgaaaaaatatatatgcacttcttgtttttgttttttttgttattgggtgaattcaataaaaaaaagaaaataagaaaggacatatacatataaatatatatatacatacatacacacatacatttataattagaatcatgttaaaagttagtttgttcagttcaattttttttatatatagaccttttatttctcacttaattggttgtcgaagcacttgatatattacatcagtaaataagtactaacaattgtgatgtgattagttcatataagttcatagtcttcttatccttcttttcaataactggcttagcacccactattgttattttttttcttccctcccccaaaaaaaaattgtaaattaaagaatttatgaaagtgtaattttagaaaagaatatagattagattatctggtcacgaaataaccaacatcttcactaattaaaaagtaggaaaattgaaaggagaacttaagttttgtaaaaagaaaaattagtatatcttccagcttatgaaacataaatataaaaatacaaaatacatacaaatatgcacacacgtaaatgtatgaatatcaaataatgcaaaaataacaaaacaatatccaatactgatatgtaataaaatttatttctttaagatggttacaacatcttcatcttctaagacatggttcaaaccaacatactgtggttgatgtttaacactagtaccatagactaacgcatttctaaaatcatccactaaggacttatgaatggaattacaaaaatcacggactgtgcaacgatcagatcttaaaactaccggatcagtgaaatctggaactctgccctttggtttggtgtaaactctcacaaggttcaacttctcccacataacttgtaacaattcgtcaagattccattccttcccacttgatattggaacagcgtttggaattctatataataaatctaattcttctaaggacagggaatcaatcttatttaacacataaatggctggaatataacgtcttgttggtgcttctaggacatcaatcaaatcatccaccgtggcatcacatctaattgcaatctcagcactattaattctatattcattcatcacagcacgaatttcatctgcatccaagtgagtcaacggtaccgtattagtaatagatataccacctttctcttttttcttgacgataatatctggtggttgcttgtttaatcttatccccacaccttccaattccttctctatgatctgtttatgatgcaatggtttattgacatccaaaacaataaacaatagattacatgttctggctacagcaatgacttgtttaccacgaccacgaccatctttagcaccatcaataataccaggcaaatccaacatttggatcttagcacccttataacggatcacacctggaactgtcactaaagtagtgaactcatattcagccgcttctgattcagtaccagtcaacttggataacagtgtggacttaccaacagatgggaacccaacaaacccaactgaggcaacaccagtcctagccacatcgaaaccaacaccaccaccaccaccgctacctgcagaagcatttgtcaacaattctcttcttagtttggctaatttggcctttagttgacccaaatggaatgaggtggctttattcttttgcgtacgagccatctcatcctcaatagctttaattttttccactgtagtcgacataatagatctctataaatagggacttgatgtatatttgtatttatttgtataaaaatgtgcaaatacccaacacttcttccttaatcgtttctatatgaatatttctaactttagtaatatgcagataacattaccttgtttaattgtaacagtagatctttaagctcatcgcaatccttttcatctaaattatttctaaattcattataattgttaacgcttgattgaaaaattttatatgtctttccgtacagagtgatgcaattgtctgctagtgccaaatcttttttttttctttttttattttttttaaatatttagctacgtatttgcagaaaatcgatagtaattgtaataatagtatactggtcagtccaatcaatagctctcacatttctggaatcacgattcatcaagttcctagacatacacgtttatcttttgcaccaattaatacaaccagcgggtgaacattttactgataatagtaatattagtagtatacaaatatataacaacaatcacactgttatatatacatatatatatctatatatattataggtcatatttattcatatagtaacggaatatgttataatacaaaatcaataatttaaaatgaatagttcaattccatatttatatctttatttaagctggtacttgagctaagatatcaaatgcaccagtacccacattgttcaacttaccaagaacaattcttgcagatggtgatttcaattcttcacattcattgtctaatactgccttcgtcaagaattgacatgtagtttcataggacatcttcattaaagaagaagtagaggtttccataccttgtctgttaaaggcaagatatgtaccttgtcttgtcatcatatcagcaatcaaatctaaatgacggaaggaaacagaaatagcataacgagagaaaacgttgttaatttcattaacaatggtatttctggctgcctctacaccataaactctcaatactgaagcaacatcgttggaagtaatcttgtcaacattaatgaagtcttcttggtcccacatggcttgaaaattaacaccctcagttactaaaacacgtctgccattttcagcttgcggatggacacaacggtcaatgtgtgagacttgtctaataatggatttcttacagatatcttctacaatattaaccattaataacttttcagtgtctgcagatagttcaattctaaattcacaccatttaccttcagcatcatcaaaattatatctagtaacaaatctgtggcttgcaatgatagcagattgacggtcacgttgtaacttagtcatgtgcttgttagcttcttcaatatgtctcttcaaatcttcttccatatcaatatcaccatcttcatccacttcattcttgctttcatcatcagaagaatccttatcagaatcgaaatcttcttcgtcagaggatttctcagcctgtctcatggtttcaatttcatcttcatctggttcttcatatgaaacagcctcctttgtcttcttatgatattcttcttcatcaccatcttcatccagctttttacttgacacttctgaaaccttgtctaacgatggaacagcagtagcaatatcaggtccacctaatttcttttgctttctaatttccttcaaaatagcagcttccaataaggtcaagaaactcttagagatggcctcttgtaattcttcctttgaaacgtcatattcctcaaggtattcttcagcatcaaagaatttcatattaatggcgtaagcacgagctgcagcttgtgacgtagaagaaacagatgtttcagtgacagtaaccttatctatcatttcagatagcaaaactttagagatagatttactaaacaattcagcttgttcatcactaacatcatctaaaattggtaacgtcatttgaggtgtcttaatagcagcggatgcggtcataatgatttctctcatacgtggaatacccaaagtaacattagctgcaccgtgaccagcaaaatggaaagtgttcaatgtcatttgtgtcgatggttcaccaacagattgagaagcaataatacctacagcctcacctgggttaattaatgaacgcatatatttcaattgcatcaatgctctgaattttttttcattgatattatcataggacttaaataatttagaattgttatccaagaaactttctaatttgtcttggaatttctcggacaccgaacccaaatattttgctggattatatttggataacactggatcatatttaagaacttgttggtaatgtggttccttactatgctttcttctatatttcaaactcttcttagagtacttcaatgcagtctcaacatccaaatgctcaattaaggcagatgggttatatttctttaataaagcctcgtaattttccaaacagaagtcaaacttagtcatgtgggattcttttgtgacatcaatagcatcaccaccatacaagaattgaattaaagtaccatctgcgtctcttacagtattatcgtatgagatatggacaccttccaactgcttggtcaaacaacgttgtaaataacctgatcgagatgtcttcacagcagtgtcaattaaaccttcacgaccagccatacagtggaagtaatactcttgtggtttaataccagaatagaaacgacctttgatgtaaccacctgccatagcatcagtttcatatggtttgaaagatggtaaagttttaccacttaccataacaggaactcttctaccttctaaagcttgttgacctaacaaacacatgatttgagaaacgttaacattggaacctttagcaccagataaagccatagcttgcatagaattgtatggaaacttcttcatagtaccagcaggaacacaagtggaaacgaccttagatgtgatagcgttgaccttagaagaagtaattgcatcaagaatacctgatttattgttgtcacgtaaaatttcttctaaacgcttcaataattcagcatcatcagctggggtatctttatctaagttagtaacttctgcagctgcttcacgaccagtatcaactgacgatttcaaaatatcagatctccatctattaccttcagctgttaaacgtaaatcatccataccacaagtaaatgctgtattcataatgtagttagtaaaaagtctacctaaaactgacaaggtcttagcagcaacctcagggccataaatctcatgcattgaatgaacaataccgtatttagaggcaccatattggtttttatctaggataccacatagcaattcaccattcttaaaaataacttggttttcattagacttcttaccccagtactcatttttaatcttattagtggaagttaaattaatacctggcatatcagcaggagtaatattcaataaaacagtagtaataatttgcttaccggtccataatggcacaggtttcatgatagcaggtggcactgtgagtaactttggtctagtggaatgaccatcttcaggtctaatacaactgtaaatatattgttgatattgctccctagtaaagaaagaatccttattagttaaccaaacaccagcagaaatatgatcttgaatcaaacctctaacaggagaaccagaagttggagtcaaatattgagaatcggtgtttgccaagttgaaagcttcagctcttgcattttcattttgtgggaaatgcatattcatttcgtcaccgtcaaaatctgcattataagcaccagtatttgcataatgtaaacgcaaggtcttttcaccaggtaggactctaactttatgacccatcatcgatgctttgtgtaaagttggttgacggttcatgatcacaatatctctattcttgatatgacggtaaactttcttgtttaatgtatgagtgacgccatcatgagaggatggagtcattaactgattagcaacagctttacgttgttccaaagacataccaaccaaagataataaagaaccatcttcattttggacttggatagcacctggccacttatctggaccattaatgacagcttgacgcaattcagcaatgttataggaagtaacaggttctgggtatgttaattttgtggcaaaaacaggtgggacaccaatttcgtttgtctcaatattaggatctggtgaaataactgaacgagcagcataattgacacgtttacccatcatatgttttctaaacaaaccttccttcttttccaaagcttgcttaacaccaggaatagggactttggcattattactttgagctttagaagaatcaatgaatgcgttaacatcattttgtatagtaacaaaagcattcatcaatcttgcaaagataattcttctgtcttcaacggaaaccttatccttttgtaattttgacatttcttcgttcaaatctctaatcaataaagaagtagttaaaactttagataataattgattttgactattttcgtggacttcatctcctaatttagatggtaaacggaatctggttggtggaacaacaagaacatccatgaaaaaactgttagctgtaacatatttcctagatagatttggtctagcatgaaaaacatattgtaatacttgttgttcagttctaaagactgcatttaaaatgtttctaacttctgttgatagaatgtaagtggaaccagtctttggtctagtggaaggatttctaccaatgttgaaatcagcagactcatcgactttttcaccatccaatttcttagcttgttgttgtttcttgatcatatcttgacgaataaagcccttaaccctgttattagtcaattgtttttcgtttaaagctgtctcaaagattttagtaaatccatcctttctaaattttggtgaatacataccacaattatcacactttggtctggataataatcttttatggaagtcatggatcaattgctttctttcagcgttgacagtagctgtgaaggtacctctttcagtagttctaccttcagataaggctttagcaatacaaagttctacatattctttacgtttgatcattaactttttattatcagcttcattatttttattgtttgattcatcatcattttctgcttcttcaaccccatctccatcttgtttactttgtgtgttacttaaagtcacagcactcaatttaatatcatctaatttgtaggcttcatcgataagaccgtattgtaataacttcaacttcaaagcataagcattaacagctaaagaattcagtctgaaatgatgacagtaaagacatgacgctcttaaataaatgtataattgattaaaaaataatggattataacatggtacaggtaattcaatgtgacccaaatgacctggacaaaatttttcatctaaaccacaggtagaacaaagatttctcaaaaaggcacccaaagaaagatcatacaacccaccagagattggatgacctaggttgtctaagactgttggattagtgatctgtttaacagaaagagatctaatctctttagcagaaagaacactaaagtttacagaagtaatctcagatccaactggcttagagatatccataattgatacaacaaaatatgagtgaaaaagaaagaaaccaattaaacaaatgacaactttctagtcagtcagaagttgtgatataaatatatatatataaagaagtatagatatatattattaagattggaaagagatgaccttctagaagcggtatcaagcaaataaaaaaaataaaaaaagtgctttaaatggtttctggttataactgtggtgcaatgtagtaagtaatgaagagttatttacaaatgataattaacatacatagacacaaatgagtaaatataagatagacgtgtaagaatgtaaaatttaaaagaattaatgttcttcacttctttaagattgaaatatctcttctcttttgctcatctcaaaaatttttcatttgagcaaaaaaaaaaatttttcctaaggtcacgtgtttaacaataaaactgaatctcgagaacatttgagaaatcgacaaagagacgctttataacaatattctggaataatggaaagtgaagcaaggaacaaactgtcaatagctggtagcattacatggctatagactctgttaagatcgaagaagactatgaataaagtaattagtatacatagtttagggaggaaaaaataaaaatttattaaaatataaataaataagtggcatatctataaatagataaataactgggttaaaagtcatccccacgatatcattaagtatttgaattgctttacgctaatttaacatcaatttaagtctctctatcttttttctttaaaaaacaattttagatgaaactatgtcagctccaacattacagacaactgcattaatgactgaacatttggggtaccctccagtgtctcttttagatgatattatcaattgcgtaaacgatataatgtataaatgtatctctgcaatggaaaaatatttattaaaaaaatctgttgttaatggacatgattatagtgaagaaatcagaattggtgtagctcagttagagactttactagaaaattcagttgacaggaattttgataggttggaattatatatgctaagaaacattttgcatgtacctgaggaattaatctcaaataatgtatttagattaaaccatcaaagaaatctaattcttgccaatgagtctctaagaaacacgagtcaatatgtactacaagataaagtcaaacagatagaatatgaattatttaaaaatgaacagttaactgattatctaaccaaattaaaaaacttaaaaataaaagtaggacgatataaacaatttgttcaaagaattagcacttttgattcgcccgatttgaaatctatatacgaatctctaaaaccaatcgataattctatcactctattaagtaaacagttgaaacaactttatgaatcttcagaggagatctgctcaattgaaagagtcaatttaattagaagggaacaaatcaaaagaacaattaaaagtaaaaaatatgaaaatgtacactataatcctttaaataatcacatcactagcatcactaatagtaataataatacaatgatagagataaaggatcctgatgtcagtacctttgaaaatattccatagaagacaaaatagggagagaaaaaaaagattttttctgtaaattaatctagatatttcaaaaaattttcatcctccaaccatccaactttttcaaaagcagaataaagtctcgatgctttattaacatcaatcctacatgccttttgtgcatcagttcttctaaatggaagattattttgtaatttacaaaccttctctaagaataatcttctcttggaatctaaatataaatcacaaggtaaccttaaagtcgaagccaaatttaattctgccggatgcaaatatgatttcaatggatcgtttgaaagatttaatggagatcccttccaccccacctttaaacatttattattacctggtggtaatgtttcgatagatggtgaataatcaggtaattttttccaagatatattaggaatatattgtggtacgtcttgaataagatccatggatgcaatacttggccgtggtgatggtgttgatgccattttaccattccaaaatggagaaacagacttcttgtaaattgtgggctcttcggcatttaggtaatttctataagagttttttaatacattttttcttagaccttcactctccacgctactttcataataaatatttcttaaataatgcgaatgccgggagttgatatttctactattaattctattataatatgactcattttcataaatactctggttgctgctaaacattctatatttttaaagaaacgatttaaggttatacctatagattttggttgtctggtcttttttccatatgggtagtaccattattccattataacgattttttgcatattgtatagcatttttgatacttttttggggtgatactggaggtgatggaaatttatgtttaatccattcagaagaatcggttccaaagcattttctctttagttgattctggttattattattcgaagtaactgaatctagatttgaatcagattgtgaaattagatgttgatcttcttttcccattggtagggatgtaaatacaaaagttgatgaagatcttttctccttcatgattggaagactcttttatctttaccctaatgttgtctatatatgtaactatgaaatccccagaataacttatatattgttaacattagaactctttaaccaatatatattgtcgttcaagttaacttaacatataataaataaatatacaatattacattttcaaaaacaccaataatttaataaatctaataaatagtcattcactatgatagtagcaagttctctgtttagttttattacatcatctgaaataatctcatacaaaatatttaagggaagcacataataactcttcgtgcggctgtttgttgaaaagtttgttagggtcagagtagaatattcaaagatattcctacattgttattagggttttatcataaaaattacttttttaccgaaaagttacaaaacagctagggtttagagattaagttgtcgagcattagatgaacaatcaatagaatcaattattagtgaaataatttatcaatgcttcagatacatttatatttcttgcgcgaataattggaactctggattacatattaacaaatattgtatcagacaagtttctcactacattctttgcatttttatcatattttactcctgaaaaaaaatatatatatataacaaaggataaaagctttatttaatttactggatggttcgtttaaagactagatatattctattcgaagtgatactttcacctcatattattaacattgatgaaaatgaggaccacataaatactgtccattttacaaaacataatattcttttatcacatcatagaccatgtccaaaagaaatatcaaataaaacgttgttacaagagatacgacattctctacaactcaatttcggtgattatggatcagggaaagttggctctctacttcaattcaaatacttttctaataatacaagtactggcattataagatgtcatagagaagacgtagatacactagtagctgcattgactcttattaataaaatcggtgaaatcaatgatgttattattaatccagtcaaagtgagtggaactataaagaaaattgaacaatactccataagaagaagttcaaaattgatatcgttgttaaacaaatctagaaaacagcaaaaattaaaagtcaatttaattaatgattttactaaaatagaggcagatattgaagaaaatgtttgattgttatttacctcatatatatttagcatcatagcatttaatctaattaatatctttagttatatatttatttttttccatacagatatagaatacatgtataactcatttgcgttctgcttttgtaaattctacaggcccattactcataatactctcaccatcatcggtattgccttcactcttgttatatttcacacgatagatgctatcaatattctgttgtacaaataatgggttatcgtatgcatcttctagcctacttttaccacttacaattcccttagtatataaccttgaatcataactaactgtatctttctttttagttgtttctttttgatacaattttatcttttcagaaatatctctagaatttaatgatttgctattgcttctttgataattatgacctgatactaacttattctgtcttgcttcttttgcaattctgtttaacttctgttctctttccttcattactttatttaattctctaatcttagccttttttttctcttgtaatttcaatctagccttcctatctgcctgttctaacgcattagctaaatcgataaaaccttgattaatctcctgtgattctccatgttttccacctccacgagatgaaattgcataacctttaggattcttccattgagacacaaatgaagggattctccattcatttttcatttttttacttatctcttgaccactggtatttgaagacacatacaattgtggttgaatagattcttcttcattagatggaacatagactttctttgctgttttaatcatctttggttgtaatggatcctgaaccttagtgacaacacgaattttacgaccattaccagcagttattgtttcattagtagcactagaaaccggttttttgatgttcttagataacaggttttggaaatgttcatacgtacgtttatatgttttatctatttcttcagcagatgggtaaggtatctccaagttaaaattctcatatcgaagtggaataaaatcctgcaaccgtactcgagatgcaatattattgaacgatatttctatactactaggctcactatcttgtggttgatttgattcatatctatcatctgtgagagctctcactatattcttaccagcttcacgagtattttctatcggttttatttcgtgctttggatcaggcaaaagagaactaaaagtcatcttcacttacctttcaaattttccttgaatttctaaaataataagtataacaataataataatgtttttctaactcgcacttttatattctgtttattaataaacaataatcttcactgcctgaacatctaagctgctaattcaagtgctacccttctattgacttttttttatttaacaatgtagatcatttttactaaactaactccttcttcatacaaaaagaaatgatacgaaaataaatagagaacatgtgaaaagtattcaccatgaagttcgtatctaaaataaaataaaataaaagaagaaaaaacataaccgtctattcaatgttaatataatgtatctgtacattatcaattactatatttcattatacatcaatatatatataattataataaaacgaaagaatattaagaagacctgaatttgtcttttaaagtaagtccaaatttatgagcggatgatgttttctttggaagcatggtttcatctaaactagttaatgtttttggtttcctctcttcctcaacagtttctctcaaactttttctgaatacaatcccttctaaattatgcttctgttttaaagcagtatttacttgtagtggtattggtgaataatgcaaaactgctggttttttataccaaccctgctttgtcggtctaggattttctgatggcaacatagggggcacgccgataaatctcaccttcttgacgatgttagatctctcactacctgttggtgtcgtgaagttagcaataatattatcgtttgatgcagcattacttgtaatatcagaagcttcttctaatccaactgatatctgttttgttgtagaatttggattggctgattccttgaattgtaatctttcaccactatgattataataatcctttttctcctttaaaggagaagttacaataattttcactttggtacttaatggagaagctatcctagatgaattgttatttacttcagtaacaatcttaggtgttgcctgttcatccgaggacaacttcaaagtcattgaattatcactgtttatactagctgaacgtgatctattaccaccaggcgatttggaccttgataaattaagactttggttactttgtgttatatgttttcttaaatcaccgtccattaactttttcattgtatcctgaactaatcgctgattcaatgcatcattagcttctaaagaatttgaacgtttagtattagagactgacataccaaaattttttgtagtagtagtatgtttgactgtttgtaaagatgaagaacggggtctaccttttactgatgatgaccttcttggtatactcttactttgctctttagaaggttgagctaccattgttgacgatcccatcttttcatttgaagttgtagactgtacgtgttttttcgtgggtataacaactctatcaataattgatgaccttctggacactaatggagaattagtacttgaatttctaggatatgaggagctcttagacaaaggtgacattcctaaggaaaaattcgtggagttattatctacatattgccttttattattattctttggtgacaacgaggaaagagaagataaaagtactgtaccattgttggatacatagtttttggacgttaatacagattgatgtgctttagtattcaatatttgaacatcctctgattgtagtttatattgtaaaagtgaagacgttcttgatgatgtctttgaagaatgactagatgatgttgtggatggtggagaaaaattatttagagtattttcattatctaataatttctgttgctttcctgtagttttctccaaataagatagtttatcaactgatcttctttccaacaacatcctgtttaattgatcatcttcataatctttaaactcctctaaagtttcaatattctcttggatgtatttccaaacagatgcccatttagtcacccaacttaaatcagacttcattaattggatatgttttatagtaaattttttatgaagaacagctacagcatttataccaacttcatcattagcaatgtaatttatgttattttcagtaaatgagtccaagtcatctctaaaattacaaaaatcttgattagtatactcagttgatattttgtcaattttatctaaaatctgttcatattgatagacatttttacttattaattttgttttgcaattatggaaataatttttatttggtagatatatagagatcactagactaataagcatagataatagatcaaaagatttgtaaagcaatgcatatattctgtgtaaagtgtactcggagaagggtaaagtatcaaaggaggaggatttgttagaatattgattgattttattataataatctttgattgcaggaatcacctttttattgaaatatttcacaaacttatcgacaacttgatattgtaattttaaaaatgatgataaatttgtatcttttgatctatcttttattagtacagcaaaatctaatgataatggtacctctctaggccgtattaaatcttccacataatcaattatgaattttgaatttatttctgtcagttcataaggtcgattagaattactggttttttctaattgaatctgtcttaacttcttgttatataatgaaagtgtctgcgatgttaatttcttcaaataattcaataatttccactgtaaattttgatcataaatatgcaaacgatggctttcaaatgagtcttcttttactattgcaaagttaaaggtacttgaaataaacgttgttgttattggaagattcacatcttgagatttataaaatttaaattggcataatgctatataatgttttctgatcaatggatgaatattaaaaacatgaccctcacatagcttaagaatataatttaatagtggtatgattatattattgcttgttgatttggattcttgattattacctgttaacagttttggattctgtaaatttttctctaaaactccaattatcctatttacctcctgcaatctatataaaccatctttatactgaattaatttaatatcataggcagttaatggtgctaaaaaattcgtctttgctacagcaaccattagaaaaatacccctcagatgaagtgtaaatatttataatcttttaaacaaaaaaggaagaaaaaaactggatattggggaataacactatattgttgatataatagtataattttaatacaattattcttgaaagtgaaacttttttagtaagattttattcaacaattcgcttttccaagttagcaatagttaaaatcctccccgattattattaatattaaactataatttaatgactataactattgaagaatcaaacgtcgttaagaagaccaacacgggactccaatacggatataaacccgttatgatccacctctttctctccgtctctttatcttcgatattgaaaattcgatcaactcaaaaggtatgaaagatgatttaaaaaaccctaatcgtttgttacatactattttccaaattaacactataaagagggttagggtttgtctaaggaacaagatatatggaatggaatggaataattgttggcaattgacaaagacaaaggccttgtatctatataaacaataatgtaatccataagataacgactacagctctattatatgttagttaagttagaaaaaactaatacacaaaaaaaaaaaaaaatatgccggcttcataatgtttataaagttaaaatatttctatagagctcttggaatacgtatcagctggtcattacacgaacaatttgatttatactagcaagcttatatttagggtgattcacaacatttggatcccgtaaatcagcttcattgataacacgaatttctgtttttaggttcaaagatttatcaagaactggattaggaaaatcatttaattccatctttagtgttaatgaaccagcttttgatttgtccttgtttatcacattagctaaatgatcaagaatatcagatggtattttagaatcccctttagctggcttatatttttttaaaattgtttgcaattggactgggtttaaaagataacaaaaatctttagcaacttccaagtccgataaattgttcattctcaattgtagcaatgtacacaactgtctcaaatgaactaaatcttttcttggatctatcttaatgttatgttttaagaaccaatcatctaatgattttaaattattatggattttatgacccaacttccaatccatattatagaatttaacacaaagatcgttaacacatagtgaattggtaaaatttaaaatattaatgataattccatgtacaatatggttttctaacttatacatttttgagaacttaattaattcgtagaaaaataccaacaaatgtgttaatttcttctcattgattccttcttcattaaatcgtgatggggacccaattaaaatatttgataaattgagatcatatctaatatatgacatcaattttttcaaccaagtattataagcagtaattaatgcattgcctatcaattcatgccagtaagaatgtgtttcgtctctgtcaataaaagatttaatatatgagtaaatttcaaacaagttactaaaccagaataaaccatccccaactaaatttttatcgtcagataggtttgacatattttgtaatatactatttatggaactttcaaggaagtttattaaattgttaaaaagtttgttatcaatatacttttgagaaacaaaatttataagtagtgctggatataagatagaaatattattatcaaattcattaacaattcttgggattgtgtacgattttaaaaattcatcatgtacctcattaaatatatccttttccactgtaagtatgtttttgatatttgggttgttgacttgttgtgataagaacatcgtgctatcttcagaaatattttctaaatctacatttaactttgattcaggagatgcactatgattaattgttgcaaattttgacgtatcatttaataaaacaatatcttttaattctgaatctaataaatgtaacctttcgtgtaatatattagttttattatcagctttgtgtgtttccttattgttaaaatattttaattgagatttaacagtattttgccattgaatatattgcttacgtaaggtttttatatcagaataatttttctgtaaaagatttattacattattaatctccaatttcatatcattatactttgtatcattgtttaatatagaaagtatatcttcagagttttccaactgctttatagtatcataatttgttttattttcattaattttatctttgagttcttttatgaaatcaagaaactctacaattaatttagcttcttcagaattagaaaacatcatagattctttcaatttttgatattcgatttgtgctgctctttttctcatatgtgactgaatcataatagatgatttcttcatctttgtgtattttgatctttgataatatgcctttattctactttgaatcagcactagagctacctttctttgttcttgcctaatatactcttgtattaatatctttttcaaatatgcttgaagtaaaatattcgatctgacaatatcggcatagtatgtttggacagtttttgctctaatgacagattgaatcatagttgcaaatcttatttgtaattcatgattaatttttttccgaaggagattgttgtgcaaacgtagttgaatatttctaatggactctataatggctaaatattgttttctatagtatctgcctctaatcttcttttggatttttgttataattttagtaaatacagtagatctcaatttttctaattgagctagcatgccggctctaaaaaatattttggttctacctatttggtatttctctttatcatcaatagtgacatccagaatatttttaactaatgggagaagattagcggtatcatcatatagatattgttgccattcagaatttggtaccaaaaaatagtacctttgaacaaattcatcaaatgaccatctagatgggaaaccagcagatgacattttgattgtttcaagaacaccacaagcacgtaattgggataaaaccattaaattctcaaatttccatgcttctttatttggattcggtttgatgcaacgaatataatgaacattagttgcatttatcgtattcattaaatctgttaatgaacctttgaataatgaacctaaggttggctttttttgcaccattcttcttgaaccagggaaagttgtatgttcttttttcttttcctctatattcattgaagttttttctaaattatctaatagagaaaccaacattttgtttgatgatgatttaagaatttctaaatgggtatctggtacagtatctctatttttctcaataaaaccttctacatcataagccacatcatgtgcatagtgactaacaacaaattttgtttggccaaatcttggtttagagaagactttgtttgttggctctttatcgaaagattgatataatttttgagtccatgattcatcagaacctgagggtaatctactttcttcatctaaaagagatagaataccaagcttattttcaattaagtctatacatggctgattatcattgaattcaataaatgaccattctatctcctctttaatatattcttcttgctctaatttaaaaacatgctgattaaattcctgttgcaatttttcattagcataattgatacaaaattgttcaaatgaatttttttcaaaatgttcaaaaccatagatatcgagaacaccaatgaaatatttaacatcatctgactttatctccttatttaaattagcattaatggtttcaatcaaccaattaaataatgctgaatatatgaatttagaaacagaatctctaactacaatagcttgattataatttaaatttgatatgattttttcagatcttgttattatttgtttttttgtaatccatttagcaaaattgaatgaatcaattcctaataattcacacgcgatctgtaaatttttatcctcagaagatacagaagcatcatttcttaattttttgatttcaatatttccaagatgaagaataccagataatatttggaaaatttgttcttgaacttcagaatggatacccaccatacccaatgcatttattgtagtatgaaattcatccttatcactgacatctggaatatatggatcaccaccttgattcatataatagtaatagtctatgggcttatctaaatgtagtttaaccttttgatcatctgttaaaccatttaacatttgataaaatatatggtaatttctttcccccttaggttgaaacactaatctagatctttctaataaatatgttttaatttgtgctcctaaaattttgttatctttattaaaagagatggatagatatttaccaaatctagaagaattatcgtttcttgtagtcttagcattaccaaatgcttccataattggatttgttgcaagtattctatgttcaatctctgacgtcttttgcatatgtgcagcttcatcctgaactgaagcatagtatctcataatatattttgcagatacagtttttcctgcaccagattcaccactaacaataatagtctgattctcaccatagttcttcatatgtttaaaagcagaatctgcaatggcaaaaatatgtggttgcaaatcttctttacggtttgtggaatattcatgaattttttcaggactatacagctcatctacattagcaaacggatttgttgcaataagaacaattcctgaatatgtgtaaatatttttatctgtaaatcttttcttgattgcatgtaatacagcaggttcatttaaaaatgtaagagaagttaaatcatcagtagcttctaacacaggtggatttcttaaatgaagagcatcattgaaatcttccttaattttatctaaattaacttcgatctcttcatcattttccaatcttaatctagcttcagtagattcagaattcagttcaatgatctctgcgccaacccaaccatgttctttgctgggataccaacagcgggcgccaacgtagaaagtcatatggttgcttttcttaattgtaatatcttagtagaaaggcccacttgaaaaccttttgattgagtagaaaagaagcaagtactttcataagtaacatttttgtgtttattcatagttgtttattaagttcagctgtcgagatgtttctatatcttgtttatagtttgttcctgtgattttacattggcatattgtttgtcctcgaaggaaaaaaaaaggtgaaaaagtaaaaaataaataataaaaaaataaatttcagggttaagtttttcttacataaaaccctgttaacatttatttagggttggaaggcaaaaaaaaaagctttttttttggagaaattacagaaattgctacaggtagtgaaagaaacaaaacggcaggggaagttggaatgtgtgaggtctcaagaacataaccagtatcgatgcaaactcataaggtaaggaagagataagaatttggattgataatttttaaacaatgtattgtacagtggtttttcttttgtttgatctgtgaaaaagataaaaaatataaacgcaacagaaagaaaataaactataccaggaaaccatatacacttttgtatgcctattcatatatgtgagcaatataaatgagcgaatctaaaagtcatattggtatacctcccttgaaaaaaaatccagagaattcagaaagaaactttagactattcaagaacagttttatgcaaaatgatatcacgaaaaaattagataaaaactataatataaatcaatatcaaataaaacgggcagattctgagattgatccaaattcagaagacataccgcctgagcaaccatcaccactaaataattatcaaaacataataccaaaaaatgatatatttgagaataaaaaatggagggaagatattggcaaacataaaatagacttcaaaaatttttcaatgaagaataaaccttcagatcatttatatacaaataaggaaaagctttctttacctgtaaataaaaaaagtaattttgaccttgaacattttcaaaaaggaagagaacattcattgccagaaaatttatccaataatcatacaacttatccgattaataaaagttcctcaggttttcaaaataactccaaaagtaatgatcataatgattcaaatcctaagaaatcaagtctcaataatcatactacttttaatttgcaacattcctggggagaaaaatcgcatatatcaaatgcagccactaaacaattacatatattggagaagccacttagaagaatgtctgttttacctgagttacacaacttcttacctcataaaaaagaaaaagactcaataattaaccattccaaaacatcaatattgtctgaaggtgctaccgccgatttagacttgagagacaaacaaagccagtcttttgaacctagagaagactttctacaatcaccatcagcaataaggaatcaaacaaccaatataacacctatatttaagaactttacatttaaccaacataatttaaaccaaagtgatccaaaattatcagaattgcatgaaaatgaaccattaaatttgcaagaaagaagggcatctgatccctctgagatacaaagaagcaaaacaatactgccttctttccaccaaaataggagacagacaatatctaccaatgtggagattcctatttcagttcttaaggaaagaagaatgtcagcagtatcagcaggatatgagccaccatcaacaacagaattttcattaccacaaagactgagaagagccagtatggtgtcatcactaaatagatctttccccccaaatgaaactataagaagaaggtcattatctccagaattgacttttactcattacaaaaatgataatcatcacacaaaaaataaaaacacttttaaaactttcgattttaagtcatttcaatttccattatccacaccgcaagaaattattggacaagaatcacactttgataatataccagggaaaggtgagagatcaacagttgtgaaagaagagaaagttaatcgaaataatggtaggaacaaagttagaactattgaagacgacaatgattacgaggatatatctaattatgttcataccaataatatttttgctactctgattgagcaagaaaaggagagggaaaaagaaagggaaaaacatcatcaccatcatggccaccatggtatggttgattatacttctgctgttacaggtgcatttagcgatgtaatgtttaattggaatgaaacttcaaacgataatcaatcacagtctgaatctgaatcaacttctgaatcatgtaatagtctttgtaacatcaatacccaacttggtggaaatgagattatttctagcaaagaaaatactttagacacaactacccctgtaccgactgcctataactcaacttgccaaacacctatattaaataaagctaccagaattgaagagtcgaaaaaacatcgtcatcataaatcgttaaatgataatatatccaaaagtatcccatatgtaaacgataagaaacgtttagtgtatcagtttttacagtctctagctccacctagtaaaaaccaactagaaaaacagggtctgttgtttacaagtgaaaatccgttaatttcatctcaattattggacaaagattctgcaaacacgaataatggaataacaatgtcatctaatagatctttgcaaagtttactttttcatgatttggagcagcctgaatatctctcagactcacctggtccttcaccatattcaagatcttcctattcactttcatcatactctagtagttcatattcttctgatttatcatccacatcgtctaatggatcaaaatctaacgaagattctagtaaccaaaatagggatcaaatggatgacattttggatcgctatgatgtagattattaccaaagacatatagcattattattatctaagtttgatgatattatgaaatcgcacctaaaaggggctattttgaaaaaggaaattgattttcaaaggaccttgcagaactttgataatttagtggatgaattacaaaaattgaaaaagaagactatcgatcttgaaacattgataaagagtaaatatttggttaagttgacaaaagattttggagataaaaatagtgattcatttattgaagtaataaagaaaaatgtaacttataatatcaaacagttagaagcatttgaaacaagaatgagtgtatgtcagcaaaaattagctacacaaaaaagagacctgaaaaaaatggaaagtttactgcaaatagaacaaagtattattcaatctaaaaaatcacttggatttttctcgaaatatagatatatgatattcgatctcctttcactacttgtcatagtatttattgtcctaatatttgtttcttcaaagaagtgggagatgacatcttatatattcgcattttaaataatactacttaagcaattttgaatacatatactcattatatttactataacattatatatgttaaggaaattatagtgataacaaaaaaatatcgggtaatgtaatattttctttcatactcaaattaatacatatatttgattaatgacaactgaggaaagagttcctaagtctttagtaatagtgaaagttgggcttaggggttcttaagtaactattttgaagcattaaaattatacaagtcgtctaaaaagaatttctatttagacaactaagatgtttagaggattatctaattaaacattgtttggtaaaagtttaatgccactgaaagaatgaatatcgattaaacatataagaattgtaattaaatattcaaaaaaaaaaagatatcaagaaatatgttttgtgtcatatgaatatttagtattaaaaagaggggtatcttccagccaaaaataaaaatattatacaggacatatagtgacagaggtaggagctagagttctagcacctatgacatataagcacacgttgagaatgagcgcctttattcattggatatatagtaaacattctcaatattatattaaacagatttagtatacaaaattataataaagttcttcactttctttctctatatacaacatagaaataattatatacaaagattgtaaataagataaaaataatgtatgatgaaatccttggctttatatatgttaacattaagccattttcctctacgaacagtaagatatttaataaacaaacccaacaacttttggtgacctctcaacaattattactcaacaatttatcgtttagtgtctgctaaaatcttattgttctatctattttattattgaacattctatttcaacaaatataaacataatgttactttaaaaaagagaaaaaataaaaatgaaaaggaatgacggtcttgtgaattttcttttttaaataattttctgtcgagttttaaaaactaaacataaacaattaccaattagtatataaggatcatcccttaacgtcaatgctatcacttatatatcatatatagtgaaggaaaccaaagaatttatgtataactctctatattatatctatctaattataattttgagaatgtttactatgtatccaattactacagatgctaattctcaacaattattgtcctcttgaaatgctctcctcagattcaataccatatgtttactattgcacacacaactgtaataatcctccacttaaccactcaagtgttacccacaagtttatatctccaccagattccaacccaattttttacatagtaacattgtgatgttttttactgttttagttataataccgtgtagcaaaaatctatttggttctaaatcatcatgaagaattaatataaaaatttatatttcaaacagataaaatatgaaattacaagtcaggtgttattgtgcaatattgtatgttgagttttgaaatttaaaaagtgcagaactatgttctactaataattatttttataatttatgtataagttatatgaactcaatgaacacattcagtagaatactctatacatagtattaaaaaaagtcaaccccgattctgaccattcatattataatacaatatttaattttgtcctttatcataatcgcatctctaaaagaaatactgtgtagcaaactaacggtgaatttccagttcaaagttaatgacataagactgacgtatttaatacaacattactattatatactaataatataatgtcattttctgtttttttgaaacataagggtgctaccagaataaatgtgttaatgtttgtcaatggaaaattatataaaaaattcaacatcaaaaaatgctgtgtttcaatgatctttttgtttaatacagttttgaattcaaataaaacatagagaacgtataacaattcaacaaagataagattattaatagtgttaagattcctacattgatatacattgccatatattctacgtgttaacaaatatttcatttttattgccattttaagtcaaataatccgaatgttctattaaataatccctcaacattctgaaaaagtttcttagtttattcaataacttatttgatcctatttctccaagagactgttgtataataaagaagccaataccaccgagattatgcaagattcgactagaatctagaattatttattatttttatgtacagagcatttacatacctttattactgcgtcacaataacctattgtcctaaatattctatggtgttctattatattagtataactaataataaagatatggattactaagctcattaatatatcaatctgaataattgatcgagctccagaaaacatataaaaggacaacgttttctggaaataaaagatcatcctccataaccttttcttgtaaataatttatatattatatataaacataaatagaacaacaagcaattaacaagaagtaacttcgaataaatatattagctcgataaaagccgctcaatatataaaactgttttagtaatcatattatcgcctatatttgattattgtctcgattatttgaataactgttaatattatttgtgcttccctagaatacacaaagaatctcatcatctaatatcccaacgcaaaatgttatagtttggacttaggaccaatttttttttttttaacagtactattgaacgaatagtaagggcaataacaaatatataagaacgttatatatatctaggggaattaaacgattattgcttgttcttttttgtattatacaatgtgctacatatttttataaatcaaccaaacatataaatttagataccaagatactggtcctttatatatgaaccatgggttgatagtttcttatttgaggttctgtaacgactgtcaccgtagatacatttctccttaattagctatttaatgtttcatgaatgtttcattttgttacatagtattcaacaatcatgtgggatttatcaacaaaccctaagtcctataaatccaaactagaacttttcttgacaatcatcacaaaaccctaacaatatttttataatcataatatcaaggttgatctacaacaccttcctctcccaaaggttcagataaatttctgaagtttgatagcagtgaattgcgacgatcagtcggatgtttgttaaattcatctaaggtgtactcacatatcaactctggattaacatcttgcatcttgcagtagtagatttgtgactcaatgtcataaccagtcacagcgatgatctctgaaagtctcattattctttctgtggcggtagctggtaaatccttaggataacgtcttttgtcattcacaaaccttttgatattttttacgttaatcaccctattctttttaaatgaagaaggcaaatcgacttcgactgtattattatcaaaaaccttcacaattctaaacggtcctatgaaaataggttggacttttaaataccttcctcccctaaaatagatgtctctatctaataagacgtattcgccgaccttaaaagtaagagagcttctatgaggattttcctgagtttccatcatttcttgccgttcttgtaggtaatcacgggtacgtaaagtaatggcttgaagtttttttgttagagtaactgcactatcatttctggctgaagagtcattaccaacatccataagaggttcattcggaataaaaccaatatcaatttcaaaaggggcagcaccaatagcagattgaggagttgaattgtagacgaattcgaggtgtggtaagaagaaatcccatacagtgtgatcattgtgacaaaaggtacgtaataatctattgagtgttttattaacactttctgtttgaccatctgtttgggggtgattcgtggtggatttaagtagcttgatgtgtaaccggtcagtgagttccttataataaccacttgcgaacctaatatctctatcagatacaatcgttttgggaaaaccatggtaacagaagacatagcgaaaaagagcacggacaacaccggtagaaccataacatttttgcatagcgataaaatgtgcacgtttggagaatctatcgacaacaaccataatcatatcattaccttgtttagatgttggaatacctgtaacaaagtcaattgaaatatcaatccaacggcctgatggaacatctaaagggcgtaacttaccgttaatttttggacgataccgtttcattagttggcattgtaaacatccttgaacaaaactcttaatttctttcgacatggaaggccagtagtagtgtggagcaagtttattaatagtagtggtttcaccgaaatgaccaccttgtaaaaaactatcatgatataactgtagcagtgtaaatcgttctttggatggaacacaaattcgagaatcatagtatagaatgttactatcaaatttatagcgttcttgagctttggccgaaaacttcatgcgtttaagatatttcttataaagtgaatcatcagaggctgaaatattgaccttatcaacaacgcctagggaaactaaaatggcagcagaccatggatcttcgagtaatgattcataccaatcttgtggattaatcgaggacaacgtggttagtggataaacattaatagcagaatcgtcttgagggcgacttaaagcatcggcaacagcattgttttttcctttaatatgtccaatatcaaaatcgaattcttctaagtactgtagccatctagatagacgctgagaaggttcctttttgcttcggtaggatagtagagagctgtgatcggtccgcagtaagaatcgatgtccatgtaaatagtatctgaagtattttaatgactcaactatagctaataattcaagttcaccaatatgataacgactttgagtatcggaaatagttttcgaaaaataaccaatgacacctaataatttaccgttagctgataaacgttctagaactccacctatagcagcataacttgcgtctgtggtaagcctgtaattatcacctgggacaaacggaacgagaacaggagctgaggtgagacaagctttcaatttgatcgtggtatcttcttgagctttcgaccacggacatttcttagaaataaaatcgaaaagaggtttggccagcttactgcaatgtggaataaattttcgataataattgaccattcccataaatgattgagcactcttaatagtagtaggcataggaagttcttggatagccttaactttgtcttgttgaacagcaaaaccagcagtggataatgtatgacctaaaaattgtacctcagattgggaaaaataacatttgtttttcttgcagactaaaccctcttgccgtaatcttgttaaaacttgtctaagatcgtggatatgactttcataatctttactagcaattaaaatatcatccaagtaaacgaaaacatgtggaatatcaccaagtatacgttgcatgtatctagcaaatgttgctggggcgttacataaaccaaatggcataaccttgtaatgataatgaccgaagggagtagtaaacccagttagttcttcagagtctgccgctagtggaatctgatgatagcctgaatgtagatcaagtgtagagaatatggaacagtcacctatttttgtcattaaatcatcaattcgtggtaatggataggggtctttaatggtaagatcatttaattgtctaaaatctacaaccagtctataggaaccatcttttttctttactaataatactggtgatgagactggacttttactctcgacaatgaaccctttatcaagtaattcttgaattatttttttgcattctttttctagtaccggggtcatgcgatagggtggtaatcgaggaggacgactattaggctttaattcgatcgtatggttataagtatgagtacctgactgtggcggtaattcattggtaacagtgtctttaaattcttgctgaagttctataggaagttcatggtgatgggggttgattggattttcattcttggataattgtaccaaaaaaatttcttctacgtctgtgtcaaaaatttgatctatagcacctatggtaatgtcagttgtagtattgaaattagtgatattattagttgtagaaagtagttctggataatgttcgatgataggattgccaacaatgacttgattgtgtaattctggagtgacgtaagcgttgaattcgtatgatgtcttattgtctaaaagtttacattgaacggccttggtagtagtagaggttcgatctgcgatagcacctttccatatgaatggtgggacagtgtacggtttccatccgtttttggcaactaaatcttcactaaccagtgaagtaggacttcctgtatcaaacagtacagggacccttattttgttaacgatacatggacgttcgtgtcgagtacctactaatggcttggtggtggttataatagtagtgacttctggtattgtagtagtatcgatgtattttgtttttgtatactcgtctgggtgttttaattggatgtgtgacccagcacttttctcgaaaaaaaatttattttttcttgatttatttgtgtcttgggagtttgataaagaggataaagaagaaggaaagaaatgggaatgagaagtaacggtatttttagcgagaactcgcatgtgggcaagtgctggattgatgtcctggtttgcgacatttgaagcatagtttatattccaagcacaaacgacgaaggtcctctttatcacgtttattggaagaagtggtatcagctgagttctgggatcttcctctcctgaaagatgtaatgttagtagaatgcgtagaataacctctacggtaacggttgttagaatgaatagccataatagtatcaccgtcactatctaattggtaggaaccagaattaggtgagacgtcacctgagtaattaatcgtaattggatctagtaagcagtgctcacatttgcgaaccagttcagtggctttatgaaatgttgtcggagactgtaagacgacagcctttctagtgtcgggttttaatgaacaaattttacgactgatgtcgtacacatctagttgtgcaccaaaggaggcagtgaattgagagaccagggtggagtaggaaatggaatgtagatcatgatcagcagagaagttaaggaaccattgtgtagctttacctccaatattgtcagcaaagatgcaaattttacggaagtcatcagtaatatgatgaagaccaaattttaaatctaaggataacaaaaattcacgtaagttaaagactgagcgagttgaacctgtgaaaggttgagcgacctttatggcttggacgaggacaggattggttgggaattcggacatgatggacagatattttggcgacgctaccagttgttatagtttggacttaggaccaatttttttttttttaacagtactattgaacgaatagtaagggcaataacaaatatataagaacgttatatatatctagaagaattaaacgattattgcttgttcttttttgtattatacaatgtgctacatatttttataaatcaaccaaacatataaatttagataccaagatactggtcctttatatatgaaccatgggttgatagtttcttatttgaggttctgtaacgactgtcaccgtagatacatttctccttaattagctatttaatgtttcatgaatgtttcattttgttacatagtattcaacaatcatgtgggatttatcaacaaaccctaagtcctataaatccaaactagaacttttcttgacagtcatcacaaaaccctaacaatttttttcaaccctaatcgttttttacaatcataatatcaaggttgatctacaacaacaaaacatgggtacttgcttctatggccaagttggtaaggcgccacactagtaatgtggagatcatcggttcgaatccgattggaagcagaaccattgtttttttgcttttcctcctttgctgaaagtgtaatattagggatattacatagtgtatttgtggtataaatgaagttacaagatatattgatatttagaaagacggctgtaaaaggtactaagtaatagggtaaacaaccgagcaagaaatataatgtaagttcttttttttatattcgctaactattctattattattttccatttattttttttttttcaattccaaaactagcttttttatatttgtattaaaatcctttaatttatttctgcatttaaaatcaaggttatcgcatattgtagtataatcaaaagatgtagtaaatctcaaagtagattttcaagaatttaacagtttatttagagaaatcttgattacactctcgtttatatagacttaatttttaacattttttcctcacataagaacgagcctgctaaaagaaaaggtaacatactattagaaaaaacataaaaacatggagataataatgaacaaaagaaaaatcactaataaccaatagttaatactctataattatcaggaatatattgatttccgtcatgtgtcgaaaatgcctcagtatttttttttttcatttttttatgactttcatatcattaacaacgaatctttatcattagtaagcttgatgacacatcaatcaatgtaaataatttagaagatagaattaatttcaatcaaaaagagaatcaagagacatgtaaaaaacttctacacatggctaaaaataaatttgtccatagtcaccataggatatcgatctcatgattgattcaaataaataaattgtcaccaaagaattgagtttttttgttaacctgttttaataaagatccctggttctctcttccacctggttatcaactaaaacccatgactttaagtgtagccaatatccgtgtaggttctaattctattctaccaataagaatatttattaataggaaacaacttgcaaataacatcccatccaataccgtttttgaaacacctttattatctagcagcactcttgtatcactaaaatcacctaaaacaagaatatatatctcaaataatgatatgaaaaacttatgtgatgaattaaaagatgaccttcttctaatattatatgaactaacttctcccatgatctataacacagttcttcagaaaacaagaattggtagtacattagattttcaacaaaatatagttaaacgtataataggttcctatgatgaaaatagtgatgatcatggacgtggtgaatttctaaaatcacatatacttacaattaaaaaattatcgaaagttaaatacaaattacattttaagtttaattgggaagtagaaatttatattaatagcatatctaaattgtcaaaaatacggcaaaatttgatctttaagaattatccaaataatttagatgtgtatgatagacgagcttcattgcttatagataaatcaacaattgtaataccagaagaagaagtaatgccaaatattgataataactcaattttatcccaatcaaaagaagtaaatgttgatgttaagccagaaattatcttcaaatataaaccaattgctacttttgtaccgtgtatagatattcacattttacaacgacccagaagaaaacattgaataaatttacagaacaaacttatccaaagataaactactctatctactttttacatgaaaaaaaaaaaataataatttattagacacatactgctatttatatatgcacttatacatataaatatggatatatgcaaaatattaaaatatatactcgcaaattttctgatgttactttcataaatcaaaagaactgtctatttcatcgcctatttttatacgatttaagtcatcacttttactattaccattatttgattcaattaatgaaactatctgattgctatcatcaaatggattttcctttacttttatatctttattaactttttgttcagtttgtggaatatttttgaaaacagctaatacatcattaaatggattaagcgaggcatcatggagttcaccataaacacctctcttctgagttgtatcatacatcctaataattttttcttggccaccttcttcagcttgagaaaatgcaaaccctctttgttttttcattctttgaacttgtcttactttccgtatagcatcttgaaaatgttgtatatatggtttattatctgtaatattgtatttttgcatttcctgaactagatgataactttcaggttcatacattctcttatagtatttccaaacaaaatccctaatcaaagcgaagaatggtaaaactaataaagttaaccaaaaaacacctgaaccataaacatgtggcactacaccaaaatattctcttgatatattggcataggggaatattgaaccgtatattgggaaaaatattagccaaaatatgaatgacccaggaattgctatcagagtaaactttgtccacatattagttactaaagcagccttacctagcacaataacaatgcttactgaataaatacatacaccccatgtccaatgatctgccaccgcaccgcgcatatttagagacgtaccatatctataaaataacatagtaccaataaatactactgctgaatgataaaacccattaacaatccaactccaaaatatttgaacagagaaaaactttcctttttgaccaagtttgtacaattgtggatagcgttctaataatctactactaacaaattgatcaaaaacgccgagaataaaaggtggtaggactgtaaaaaagacgttgtaaaaacttaacgcccatgactccataattgattgtcctgaaaacccattagcaaacacataccaaaactgtgtcatgtatagtgctgtattcttatagaaagaatacaaaatagctaccgagattctctgatacgaccataatccatgaaccaataaaagtttcttcaagtatttgaactgaccaatagctaaatcagcagatctagctgcctgcataccttccataccactaataccaacaccaacatgagctgcctgtatcatactaacatcattagcaccatcaccaacagccaataacaaagatgcagtttttctctttaccattttcaccactaatgctttttgtaaaggggaaacacgacaacaaataacagccttacatagcttaccaatcgtcaataaataatcttctaaatccggttctaatgcatatcctaaagatttaccatcgataactaaagctaatgtatttaaatcatgaatagtgactttttcatcatgtagagcttcaattttttcgatcatattttttctagtatcctctttagtttcttcattaataataagaagattcatatcttcagctaataatttacaactcataccaatattgattgctgtttcttgtctatcaccagtaaggacccatattttaataccagctttttgtaatgtatcaatagtttcaggaacaccatcttgtaatttatcctcaatagctgtagccccaattaaaaatagattcttttcaataagttctgccgcatcatccattttttggcttctgttttcaagtgtagtagatgccttatcatttattactttccattcttgatattcttcttccgggatagttcttgtagctagacataatgttcttaaaccttcagaagcataatcctcaagatgtctcattgttgcatcaacgtaaatatttgtttctggatctaatctttctaatataacagtatccgctcctttacaaaataacttgatagagccatcaggcatcctgaaaattgcactcattcttttccttgtggagttgaattcacatatatttaacaattcgtattcacgttcttcacctttctcttcgagcaaaattgttattgaatttggttttctaataataaatttgtacccaagatctgcacttccttgtactaaggctccttcatctggtgatgctgcctgatacttaatggcaccgtctggttgaaattctggaataacagtatgacaagtagccaaaagagttaaaaattcatcaataaccttagattcagcatcctcggtattctgcaatcgattgttcatatcatcaaaacttctataaccaacctcaataccatcttctatagttacttgtttatcttctgggattttttcaatataacaacgtccagcaatcgaacaagacttaaactccataatatttcttgtcaaagtacccgtcttatcactgaatatatattcaatttgacctaattcttctaccagtgacgaagttctcacaattgttggtgtgtctgtatcttcataataaagcgctatatcggaaccaatcatataagcttgataatattttatcaattccacagtgacaaataaggaaatgggcaccaaatttgaaaacaaaatccaataagtcaaaaaatctttaaaaaataaagctgctttatttgtaccctctaaatacaaataagaaagatgtttggcatcagctgtactcatgataacgttaccaatagaggaaatcataataagaactatcaagacacaaaataaggctatgatttgtttattaatgatcctttccactgctgttcttttaattggtgtagcagtagcattacgcattaatttggtttcatgcccagtgaatattactaaaccaaagatccaaccagtatttcttagagttgcacctctcaaaatcatttgctctggagataaaggcacatcttgtccatttaatgttaaagtaccttcatatgtatataaactggaatttggctgttctgataaaactttaccatgaagactattgagtattctagaatcaataaacttacaagtctcctgcctagcttgtttcacttttagatttgtttcaccatcaagatttgcagtttctatatagcaaagaccctcaggttcggaagacgataaaacaataagatcggcaggaatggcctcctcggattttactctaataatatcgcccacatttatgtcaatccatcttttctcaacaaatccaccagatgttaatgaataaacctctgtttttgaattatttagttctttatcagatgtggctcttttaatatcctctacaatttctttcatggcagacacaattaacacaaccattaaagtacctatagttgtatacctgttagtaggtgatacatgaggtacttgttgaatcgcagatgtacaaaggaagaagagattggcatatttagagaattcttgaaacagaaattttggcaaaaatgttgcaacattgtatttggtagttgaaatatgattatcaacatatcctagctgatgattttcttgtttatcgttgacatatataacccttggttgccctaaattatcgctatgaatagttcctcttctcagaatgtaacgattaaaaagaattttaatattaaacctatcccttgaattaacatagttatcttctacttcagtagttgtaactgcattataatggctcatttcatatgaatcataagtattttcagtcttcttacggaaagtaaatgcattcttaactgtatctattgttttactaagaaaactgcgagcaggtcgagttgcaataggttcagcatgataactggccgatctatcattatctgttgtgccattccaaacaactgaatcaacattgtcaaatggattatctatatcattttcaatgctatcatcgtaatttggtattctatcattgctatttccaccttcggacaaataggttggtcctatataaaactcttggctgtcttcttgactattatgttgtgtgctattggtatgcccaaagacatcactattgtctggattattattgcctgtgtatgaactataatcgttatgagagtcactcagaaaatcaatatcaaataaggtatcattctgacgcttcctatctttttctttgccatcagccatggtaacttaacaaaaaagtatcacttaacttatccaaagcaggttttgttataaatatgtaggtctttctctacacaaataatctagtgctccccccaaattataccctttttagctctctctccatccttatatatattgtggtttataacaaattgtagcacctttggaaatattcaaaaatttaaagtgttcatcaataattgataaaaaataaatatggaaaaaagataaaatagcactcatagtaagagaaggttagatcaagaacatattaaacctacaagtgaagggtaaaaaaatataaaactgattgaaaatccagcaacaatatatcataatctttctggtacaagaacctcttcttttcaaacactgttattcagctgtatcataatcaattgctgaacttatttaaactgagtataagatagaagaaatgaaaatctacatgtatgctatatgttcatatgtataaatgtcttgtaaataatgcaaagcttaattatataactatttttactagaattgcccgcccattagctacttaattgtgagatgatgtgagttgttggagttcatcttgtggaagtgtagtcaagtaaatacatttacttaataattcatgatcaacttcaatttgatagtttttgcaccattgaaccctttgaataaaatgtttaacaatttgaacactagtatcaaatttattataattaataatcttattctgttcaatccatgtctttttttgtgcattcaatgataaatctgataaataaacgacaataaatggaatgcaaccttttagtggttcaacattattcaataattttcttattgccaaataatttctatccaatgaaggtatcttctttaactcttcccataccaacaagtcgcccggttcaattagcctccaagcttcaataaattgctgcaccaccaccgaatttaaagctaatacgatttgcattaatgtattgtagttttgaaacttacgacagtgttctgctacatgaataaatctttgtatagtattacgttttaatttaatatctttagtaattgcaatttctgaaactatccaatctacagttaaattgaacctggcaatggccaaatccactcctgaaagattttcattctgaaccaataactgaagccaactggttacagatggtccattatattgtatatttaaatttaataaatcctcccaatcaatttcacataaaagttccttttctatgagagtcatttgacgtgcaatagaaagagaatcataggtcaagataaaagggatatgattttcattattagatattaacaagtttggatcgtgtattttatatcctgctaataagttttgaatagcttcaggttttattaattccatatcttgtactggagattcaagtgatccatcttttttaacgaaagatggagtgtatggaatattcatcactgtttgtcttctacgttgaattaataaagacctccttttttcttgaggggtttttggaatattaacagcaggcgatatatttaacatttcaacttcttttggtagtttcgatatttctggataactttctgtagtaactaacctgtctcttacctttgcgtaagtaccttctaatttcatcattgctacttctagtggattatcttgaatggtatcatctgttatgtctgcaatattttttaatgcttcttcatttattgcttgactaatatatgcgtgaggtgatgtatgtgcaccagagggctgctttacttccatattatttggcaattttgtactctccttctttaaaaatttactcttcaattcttccatattttttaacggagatacatcgtctaaaccttctgacattggttcaaatatatatttgttagtgctggctgtctcaaaagttgatccacctttaacatttaacccttcttgaaatttggttcttaaactaactctttcacttggcttgctttcaaatatcgagtaactagaaaacgtcccatcactaataatagactgaatacttggttgtactgaaaggcgtattcttgaatgtactgattccttcatatattcctcagcctgccctttcttacaaggactattatgccttgaagtaaatagtgcagtagtagcaatacttggggtctccgaatccctttgagttacatcttttttcaaagtctttaactgatcctcactttcctgcagcatcttatccttctgaaaaaaatcagtttgtctaatattaatcttaatagtgggcatagtagttattggtgtcttgcgcctatttgtttgttcaatatttttctttattaaactaattctaccactagcaggtctaatagctgcaacagtaacagaatttctattattctcaatagaagaagattgatgctcctcatcagcaactaatatattgccttcttcatcttttgcttgttgtacatcagaaactactgacagagaactactgtcatttatattactcgtaccatacaaaccagctattacatctaaactatcattgattggttgtgaaaaattgagcacaggtttactgtttgttgatgggtccctgttcttggcattctcttcaagtgtgaactctctcaaattgttgaatgaatttttcttccttaaattaggaccactgctacagtctgattggctatccatatagtgatcattaatatcatttttagatattgataaatcagaatcatatatgacatattcaacgttgtttatgccattgtttcctttgttaattagtttattaggagattgaacattttcaacactactttctttactttctgcctcttcaagatcctctaacaacttttttaaaggagaagaacttctattacgacaaggtgatctcgaaatttttgttggtgttaaattaacaatattagaattactagaatcaggcctgcctgaaagatcctgtgaagaagtatgaaatataagtctttggggtccatcaatgtataggggtgaagtctctaaatttacatcattaaaaccttgattttgtagtataaatctcgatgaattattttgctgtccaaaaaatgctgctatagaacttttaactttccttcttgaaccaaaaggtgctgtttcaattgtatcaccattactattatttgatgcatttaacgtgttagacagagaaattactgactgtgctatggagcttactgtttggtacatatccaagttatccatggcactaaaattattcactggaagctttagatcttcaatatcatttaaattatcttcatactcattctctactgtctctactgtttctgttccggacaactcaccactattaaatttattaatcttttccaacaattcattttccatatgaaggagaaactccacttcatcaatagttctggcgctgagtatatcaaatttcgagacacctaaattcattatttcattaggattttgatcatggttttcaagagaactaatggatatcacatatttaataaaagtgtccatctgtggcttaacaatatttcctatttgtaaattatctttttggttgaaattctttttatatggagatgtaatttcatgttttttacttctcaaatgattctttttccatttatttaacaaccctaaaggtcccatgacggtatgattataagaagatctcgaattagtgtgtactgatatttcctcatgattagtaccagagtccgttgcttccatggtggatacaatttcttcttccggaatatatttagtattcaaaataagttcaatctttttggctggtgtagggggtatgattttgtcaatttttgaatttcttggatattccaagtctgctatagttggcgacatattggacggaagttttgatataatactgacttttcttttagcaggtctttctataaagtcatcattttttgatattggagtgacagtcgtagcatttatattattattattatcattattattatcattatttttgtgttgatattttggaatgcgatttggtgatacttttgcggcataattaaaactattgtaaggatttaatagcattgaaggggtatgtcttgatgatttcttattattttcatattccgaagaaatctttagttgaaagttttcattacttttgtacaatgacatcacacttcgatttctataatcaggacttgaaagtccttgtaaagcagagatgctcagtcgactattcctttttatttctttattcaattgagatatatctttaattatgaactctaaccatagatcgttcagctttccataattatttgcagtgctattagtattattataactgttattttcagagggtatattaacaggttcattaagcactacattatcccatgtcaatttcatgcagtgaatccatatttttttcaaatttataatacaatcttttatgattttatgctcatttaaataggatttattaagaaattcgaggagtaaaagccgtaattcaatattaggtaaaaaatcctgtacaaaatgattcattatcccatgtctaatgagaacaaaagttcgtattaaagcaattttgccaatcctagatttatcattatcctcaatcttaatctccaaaatacaccaattaaaccggttaatcagtatatcataaagttccattgatgaaataaattccctataaaccagaaaaaaatcattaaaaatagaatatgatacaggatcaactggagatgtcaaataaactatcaaagcataaatatctgcttgaaatacagatcgtctggatctagttacaggttggtcaccatataaaattacatctgatgatggagatggataataatgtggattactaaagatctccatgcgtgttttttttttttcttcctttcctttctatcaatatatctatctatcaaataatatgcaataacagtctgtttattgaattcttttttttacgagcagttcttcttccctgctactattattgatttattcaccaccctcctcttctcaaccaacacaacaaagctttatttatcaaacttctgctttcgtattttattttccgtttaatctataagaaaaataactcaactagtagagaaattcaatgagcagaaaatatacaaatatatgtggatagaactcttcaattgtttttagattcgattgtctatgaacaagtgtcaattattacctattagtagtgtcaaagagcttcagttgagatttacttgtttacaatcatcggtcggtttctccttttattgacagatcaaaaataagtcaccaaaaaaaataataacaaaaaaaaaaaacaaaaaaaacataaaaataaacaaattgaaagtcattttagttagggttaataatgcattccaaatgttttccagttttttaggtagggctttagggcctataacaaaaaaacagatgaaatttttttatatataatatcttataactatacaaatattttttcaccataataaatagataaaaatgagtatcttcaatgatatagaaaattaattcaatatgcatatgaaacaacaattggaactattaatatatacatccatatgtaaattaaaaacctaatttataatgcgtgttaaaataaaataaaaaaaaaaaaaatctatcaattttcatatattccaggtcttaatccatctcaaatatttgtaattaattgcagaaccggtcataccatatgatactggagcaaagtatatgaagcaagatatgacacaggccatagcaattaagtaaatgatccaacggacaatgtatcttttcatagctaatttgtttaacgtagcttcaaacacatatgttaaaataatcaatgagaaatatagcgctggaaggtaatggtggacataagtgactcttgacataatgacaaaaggcacataatgggtaccccatgctaataatggataaaatccacccatcaagaaaagattcaaatcttttttattagataaatcgttatattgcctttgccatcttaacaaaagaacaaccacataaatcataaataaaataactgatactgtagaggcccatgttgatactggtgtacccattaagaaatatttaggaaattcgtctgcccaagaacatatccttaaccctaaatataaagttggccattgccaggcagatgaagcaattggatcatatttatcatcatcaggcaccaaagcattattagtggccatcatggcaagattcaaatgaataaacttctgtagaaaactgatagatggaaactcaaaatcttttggttttggtggtaacctctcgttaacatgtgattcaacagtccaccatgtacttctatcattcttggatggatttctagcacatataatctctttttgcataaacccccattctggtaaattatgtttagactgagctaaataacaatccataacaatgttttttaaacggaatgatgttgttagcgtatgtattgttgacttattttcattaccatactggttaacaatctccaccctccaataatccttctcatcaccaattgtagtattcccataaccagagacttcccaagcaatattagtcacaggggctggtatatcatgagaatgcagatttcttccagtgttattatgaaccaatctataaatcttaccatccacaataaattctgggtcgtattcttcactgtcgaaatcaaatggtgatagctctctgactctgtcaaaaaaccagtcattattactatcatgatgtgtataacctgttatctgttgttgtctagaaccttctgggaaaatagatggatgagaatgtaataatgtaccccctacccctgaattcttcaaagtgatataagaaccaatgactacgtcacgaggaccctgcccgacagtactattgatcaaagaagcttgaaataaagatggcataacgcctgaaccttgaccatcatgtgtcaataacatgaagtgaacataaaacgatgccatgaatactgcaacgggcacgataatcaaaccaataattctagccatccaatgacttaaataggttttccaagacattgatttatcacctagccaattccataactccacaactgtataaataccaacgactgtgatgatgaatagaccgaccattttaacagagatagtacaaccaagattcaacccggtcaagatcagccatttccaccacttgatagaaaatggattggatctttcgttgtggaatctaaccaaacaaaagaatgaggtgaccgtgaagaaaagtagcattgagtccaataaaataaatttacctaaagttgtataggaattttcaaacaaaaccagaacagttagaaaccaagtagctggaacagagaaaccaatactctttgctgtaaaatatgcaataggaacacataacgcagaaaaagttgcattaaataaacgcatcttgacaaaatcgacgtaatctgggtatggtgtaccagaatcaaaggaaaacgaaccattataacctgagatataaccggataatcccacaagcatttttcctaggggaggatgaacatcatgatagaattcgtgttttaaatattgagaaccaaaactaccaaaatgggcctcatcccaaacaacgtgtttattgataccaatcttatacattctaatgtaaaatgccaatacagtaaaaatcactggcatgatatatgattccaattgggacagggtgaaatgcttatttggtacactcacttcattattttgtacatctacatcattctccccagaatctaacgatgataatttatctgttaaatatccatcatcttgtatatccctttgtcttagctctgactcaactgcttcttgatttcgattaccatcaaaccctgtagtcgcactcattttataatattaatttttgttttgttttgatatcaaaaacttggtaaagacttggtccgaatgagacaaggtagctttgatctatcttatcaaccgtaaattacaaatcgtacttcagcgacatccaacagacacgaaaatagattgatttaaataaaaactttttaatatcaaagctcttctttaccattttcttcttcttgtaagttccaatttaacgatgtttcaacaatgtatttttttttttttagtttttcttccaacaggaacaaaaataaaaaacacaaaaaaacacaaaaaaaaaaaacgaaacgaattcttaaacgagccaaaatctcaaaaagacatgtcacaaattaaaatcaaaaacaaagtgacacactaatgtgatggtagatatacaattggatagatatagatcatcaaatgagtcttataccagtatatatgagtgacaacactgtttctttatagtcaacccaacttgccaattatggctacaaatacataactgaccaaactccctgctgcaagccctatagagacaaacacagaggtcagcccgcctgctgcttctttctcctcgtttgtatccaactgttcagggactttcataaaacttaacgatatcacatgtccattagttacaccaaagagaaattgaagcaaaatataggttaaatctaaccataataatttgtttattggtttttgattttttactgtgaaatacaaaaataatgggatacaaagagttcttgatagggaataggtgaaaataacccttggagtgattctggagtctttgaaagtaggtaagtctgccaatactctaccgtaaagatcaccaatgttccataccgtaaagactaatggaacaaactgtgtattatccaatggtaatttatttactttaattgtggaagcaaatattgggaagattaatgtgactacaaatgtgaaaaatatcgatagtaacaagtattttaatttgcgataaagtacccctagaggtattgtgctcattctattatgaatattattgtcttgctcccttacagcttcattataatttagaagattattaccttgatctactaatccgtctcttgaaacgttaattccatttttattacctgtttttaccatagtaaataatattccgttaacattactcattctatacaaaaatatactaaacacacaaaccaccactgtagtcatgaagtaaaataataccccacttgtattcatagtctctgtatctgaatcattaatcacttgattatcgtttttaattaaagtaacaaaaaatagtactgttgaaggcaagactccagctacagcctgtcccaacattacactctgactaaactgaggtccaaatacgtttgcaatagccatgattccattttgtgttaatgctgtagcaacggtactcattccaaccaagatcattactaaaagaaagattaaccccacggggatatacttgatcaaagtaacaatataggaaagtagagttaatatgagaaatgttagtatttgccaaaataatcctcttgttacacgttggttataagaatgctgtctttttgacagatataagttgaatattaatgaggtaatagtagatgtcgtcatcattgaagatgtgaaaaattttgcataaacagtagttgattgaaatagattattttggaaatataaagtagcactcagtatgttattccatggccatagaagaccaatcccaacaaacaaaaatgttataaagggtaagtatctcaatttggtgaataacggaacatcttctaaatttggtattatcatttcttgtatatttcctttatttttactactagaactttcacaaatatatctattgctacacttctttcctcaatatcctttaaatatcttcacaccaattataacaactctgtaaaataaacagttatcaactgttgttttactttctttctttctttcttttttttaaataataaatatatttaatctttgtatatatcaccgatagaaatatatttaaatagtagttacttacatacaaatttatagaaaacaagaaatgaacaaagaaacagtaagaattgaagagatgctaccacataataagaaagaatactcctactttgaaacttatatgtgaaaaaaaaaagagaagttttgctatcaatgatatatataaggaaattcatttcgacactggccgattttcaaagtaataaaactttaaatgtacatttatatatatagttatttatattgaataatacagataaaggataaataataatgataagaaagtaactattatacattatgatcatgaaaaaaagcaagttgcctctatgaaaatatggggggatatatgactaatgacacaacacaaatgataatggataaaaagataaaaatcaagtctaatatgagataaatgtaggtggcatgaaaatagaaatggaaatattacacttttctactgcccattggtgcactattattaacagcagcgttattcaaaccatgactattataattataattatttttcttgctattgttattagtagagctggagaagatcccagcagtattattattaccaccgcctatattaagatgtgttctagtatttacactatttttaagaaactctaatttagtaattaatggtaaatgatcacttgggaattgttcattagggaacccaataaatttggagacatagtcctcatcaactttaccaagtaaccctctaacacgtaatgcgttcgaagagtaccatatataatcaattacatctacaaaggatggtgtgaagtttgtgaatggtaattcaccgatacaaccataacttgaacttaacgctaattgatgactaaaattaccctgtgacatatacccataatctttggtgataccatcgggatggtttttgacagatcctgtactcaataattcatatactgcagaattcacatacgaattaaagtcaccacataaaattattggcaccttcttaatatcttgtcttggattgtcttctttaattaaactttgtagatgatctaataagacacccacctgaaacgttttcacatcattaaattttggatcccaatgcaaatgtgttgttacacaccaaactgtttcacctgtctgaagatgttgtaacttcgttatcaacgccacattatctttattcatagccctatttaagaagtcttcagttctttgaaatttactatgtttcatccatgtagcagagaaatcaacattctcaaatttaatcaatttaaatttattatttttaaagaaaacacaacaaccatccactttctttgaatccttgtttgctaacaatttagctcgtgtcttagcatgaaaaagacctgtatatccatttttttgtaatagtggggaccaatactcttcgtaagttttagcttctacttcttgtaaacaaatgatatcacaactatatgacaaaatttgatctttcaatttattttttctatattcccatgctaatgcccatgatggtgtataacggtacatctttggagtggcgtaatgctgacatagtgtgttgtattgcaaaactgtaaacgatttcttagctagatctggatctttatttgatgatttccaaaattgatcagattcttccaatgaattcgattcatgaattggctcaccgtcttttgagatttcaataaattttctggtatttattaatggaatctctggcctattatctcttaaataaaatattaacccagtcattgatttttcagttaaagtctttaataacttggaatctagtggattaccttcaatacctaagaattgtaaattgtataagtttcccaactcccatggtaactggttaatttgattattgaaaaggtataaatatttcaatttgaaacaaaatcccaattcagatggaatactggcaattttattgtttgataaatccaatacccttaagttatttaattttttaatttcctttggtaaatacattaatccattcccatttaaatataatctagttaaaaatttatagttgaaaagagaattacttaaatttaataattgtaaatttgacaaatctaatgaataccacaactgatcgtcgtatttaaatttcgccaatatatcatttattgttgtttttgcaccacccgtaatgacagcgccggtgcgagtcgtaccattaacgttttcattctcagtgttgctagtattaggggatctaatattattgttattgttattattattactattactattattattactattatctctttccatttctttattaagtaaaaattcaatttcatcatcttcatcatctatattaaactgagatagtttcttattctgtaataaggttaattgtagtggaatgtttgtattgttcaaatctatagaggtgttcaatggggtagatactgcactattgttagctgtggtggttgctgtatcgacaataatactactatcattcatatttgtagtagtatttccactattattattattgttattattgctattattatttagactagattccttttctattgcaatatccattaacaattgttttgtcttatccacaagagtaacatcacttaaatcacccagattcatatttatattgctattattgttgttgctattagtgttattattattattattattattatttaaaagatcatttttcatatcaattaaattatctctgccattttttttctgcaatgcgatttgtcttgcatagatattagattgaccagataataaagtgttcaatgaaatgtttgataaagtcacttgtaatttccaaaagggattgttcaagagattcctgtcgtttaaatgcggatgataattaggattattggcgtttgcagaaattgtattaatggtatcattagctaaaggtaatggcattgtaacaacagaatttgaggccaaagtattatgattggcagcaacagcattatggttagtcaactggtctaatagaatacgttgttgttgttgttgttgttgctgttgttgttgttgagaatctgcatttaaaggtgctactagtcccggaattggaggacctgcagtcctactgttcaaaccaattgattgttgtaacatatcactagtgatacctgaagtagcagacacattattcctgttgctgctatttagggtaccaatgttcatcatattgaaatgaaaacagtggtattgaagatttgtagaaaatttcaaagaaaattagactgggagatagaggagtaggcaaacaaaaaataaataaataaataaataaataaataataataaaaatataaaaaccagaaaaaaagagagtggtagctaactaatgtattctatagcagtaaatatgagcttgcttttgtatgcttaatagagtatacgataccctcgaaggaaaacaattatctaatactacagaatatcaagaccataaacacgagaaggcaaggtctttgagggtttaccacaacgtttaacaatcccaacaaaaaaaaaaaaaataaaaaacagtttaagtttactttaaagctattcactcttgcttcaatgtttccacctctaatggagaaagagagagagggaagggggagacaaggaaaaaaattcaaaaacgaaattttgaaaatttcgtttttgaatttttctttttgtttatttttttctttcagttttttagagttgtgggaaatcattccagacgaaaaaaggaaaaacacaaaggaaaaaaacaaaacaaacaaacaagccctaaaaaccctaaaaaccctcaacggaatctgcaacatccgccagtcggaattatttgcgaaattattttgcggatttttacgtcgtgactcgtttccgtttttcccgtttggcgggttttgacggatctttaaaacataaaagcaaagacttgtgagttctttgatgatgccaagctgccttcagttgacctcaacataatgaagatttgggttaaatggcttcgagtgacttatatatatatgtatgtgctacacatttcttttaaaatcgtgtacatttggatgatattggcaagcgtgagggaaataatgtaatcagatagacaacagtcataattatcattccgtgatatatatctaatactaataattacaataaataataatatgtctacattgttattgcaattagaatttgctttggataagttacatgatgttttgttagaggcggagattttaaacattgatactgagacagatattcattcccgatgtgaatgtgttattgacttattatctcgaatatataatagtcagggagataataatagcaataatgatggaaatttctctttaaacattgatacaaggttaattggtttgctatcgaaatattcaaacatatttgattcaaatagaaaggtttacaaagatattgataacctattacaactatttgaaaactatactacaaataataataataataataataataataataataataataataataataatggtggtagtagtgaaaacactcagttattgattaagaaagtacgatttgataatactaataacgataacgatatggacattgatactataacaaataagaatttattagaaaacgttgaaagaacttttaaaccatatcacgacaatgtagaaactaatgatagccagatcgacaacaatattttgattgactcctctcatgaacagtcttttaattatagtcaacaaagatcggttttacagagccaagacattcaactgaacactttatcacaatcagtgaatatagctaattccatgtcaagacaaatgggtgatgaaatcgaaacacaaaacaatcaattattacccgatttagaagccaatctagatcatgatcaaagaagacttaatcaaattgttaatcataagatattgaggaatgaacataaggaacaagaccgtctttgtctggtcattttgatcctggtattggttcttttatttcttctaattgttttataatctaaagaaaaatgttgtcgtttttttttttaatttttttttttgtaatttatttctttttcttcgaggttttttttttaaccgtttgcggcgagattcgattgatgatgagtaatcaagaaattgtcaaataatcaaatcatctggtaagaattctagattacatacatatatgacacaaccagatataattctttactcctatacactatagaacaacaacaacaatttatagatattggggaaaagattaattcatctaattccgttgagtttcaaaatatagtagatgattaatacaatttgttgattaggatataattattatcattcttattctttcattttttttttgattttttttattttaagataatatcacacaataaatactttacagttcaacaactataaacgtataaatatataattattagcaaattgttcaatgaccgtaacaactagaaagaggaaaattaaactagaaatagaggactctttagatccagaagtcaaaatagaatctagatattttgataaaaaacttaaaacgaactcagatttcgattctcaatggattcaatcattaaataataaaaattattttgactggattgcaaaacaaactggtaatataccaaatagatggaagattccattagatccagcaatattcgatagtgatgagaacaagtctgtcttgccacctctgttcaaatctgtatatttaaaattaagagacttaaggggtaaaatagagacacccgtggatacagtagggggttcaacgttaccttttactattggaaagcaatgtaatattgataaagaacaaattttacccataaattacagggttcaagttcttattggcgtgatgctatcttctcagaccaaagatgaaatgacagcaaaggcattttacaatttaacaaaatattgccaagacgaattgaattcaaatcaaggtattactgtggctgcattacaacaaatagatgaaaacgttatggataaacttatcacgtgtgtcgggttccataaaagaaaggcacattatatcaaacaaaccgtggatattctagccaataaatatcaaggtgatattcctaccaatgaccaggagctaatggatttacctggtgtaggtccaaagatgacttatcttacattacaaaaagcatggggtaaaatggacgggatctgtgttgacgtacatgttcatagattttgccaactgtttcattgggttaatcctaaaaaatgtaaagaaccaaaccaaacaaggttagaattagaaaaatggttgccaattcaactatggagagaaatcaattcattattagtagggttgggacagatcattgataggcctaaaaaacaaagagtacatatctgtgaaacagccttaaaagatgacgcagaagcaatcgatcttgtggaacatatggtaaattataaagagtgggcaaattatgtgataaaattatgtagaaatgaggaaaagaagaagcttgcagcaacaccagcattgaatgaaccatatgatgtaaaaattaaactagaagaaccaacagaaataacgagttttgaaggaactcctgtaaaattagaagacaatcatatcaaacaggaagaagaagaagatataaagttgtgataaaaacacaactttaccatgcaaaaacagattaaaatatcatgtgcaaggaataatgaacagttacacttttgatacctattaaatatatgtacacatgtaaatatatatatatataaacaatttttaacaattcttaatgataatacaatttttaaaataattataaaattcattaattattactatcacttatttatagactaaattttagttaaataattaaccacttattgttgtaaatatcatcaattgtcggtctgtctctcaccgttctatttaaaatttttacaatcaaatctatgcaatcttgacttacgtcgttggggtcactgccaaattttaaatcaccttctaaaatttcatcaatgttatagaatgggttttccttgaaaataatagtgtaaagcaaaataccaatagcccatatatcttgaggcttaccttcatatggatcaccacttaatacttcgggtgctgcataatcaatagtaccaacgaaaacatcaaatggaccacttttaacatatgcggctgaaccaaaatcaattaactttacaaaacctttagaatcaacaatcacgttttcatctttaatatctctatgaactatgcctaaatcatgtagatgttttataccagatacaacttgtttaaaaatcaacttggcttcaaattcagtcatatttgtttttagttcaatcaaatcaaatagatcgatacaaccagtctcaccatgaactggagtttcaatatagtaatagtcatcatcttcaaagaaatctaataaacttagaatattttcgtgtggttgtttattcaaggtggccataatttgaatctctgatggaatggttcctagtttacggtctctaacccatgtatcaaccaggattctctctttgaaaatcattttgatgactacaatatatttttcttttttatgcatacaaaggttaaccttaccataagcaccttcacccattttttgtaatatcaaaaaatcagaaaatttagtgacacgttttaatgcaccaatatttgtagcaggtgtgtgtaaaaatgtagtcttttgataattatcaatttttaactctacattggttaattgtttttcaggtggaagtacgatgtttgtttcaagattttcatcagttgattttgcaggagacggtggccttggttccatagcttcaccttctggggttggtgtactggaaattttacttatgattaaagtcttatcaaccttaaagttgtcgtctttaacaaattgtgatttgtccttcgggtacagttgagagagtctactctttatttcaatttctgttggatcagaacgcagctgagatcgtaatgtatatgtattgtcagtacttgttgccagacttgacgtagaaatattatgaacttcatatgtcaactttaaatctttgtctgcagatgtaggttgactaatctccaattgattgtcttttaaagatatagtactaactccctcttttaattctgctacagaagctttaatactaggctttttagatgatgcaacggaacttccagagctgctcatatatgacaactcagtttcttttaacatttttaattgggaaggattggccttataatcttcaaacgcgacatctctggaatgagtaatccacacaaaacagtaattactattcaatacacgtacttgaaagtcaactttaattttagatccatcgatatgaataccatcaatacccgtactattgtaaaaatcctttggattaccatccatttctgccttaagctttctaaaaaaatgctctgttaaaactaagcctctattctttggcaaggtaatggacaaatcaggatgttccttactaatataatctatcatatccttgaaacatgggataattttagtaattggactgtcaacaagttcaaacaaatgatgaccaaacatattttttgatattgatttattaaaacttatcagttgtaatgtgtgagaatcaacaacgaaaagacccgcttgataaggtaaactatgaattttcaattttaactgatcctctaaaactgaacatgatacagcacatgggatattcgaagtcggttgatttattgtgaaatatcttgcacgattaacatgattgcatattcttacaggcatggacgataaagagtcatcaggatcatatatcgtttcattccgcacttgatcgattaactttgctaacgattggctaatagaacttaacttttgatatatgtttgcaaacttaacagtctttttgcttttagttttatcaattatagtaggtagactactttttatacttgtagaagtattttcattttttaaatccaaattacagtcacaattacttgaacttgtatttggtgaatcatttcccacttgaaactgtaccggaccacatttacatagaactggtgttgtttctacattagttttaccatgttgtagggagtttgcttcatcatctcttaatgttgcaggatctttcaatagattatttttattaatgatgctttccacttcaaaagtatttatattaagtaagacatctacgtagtcacaaggaaccttttcaaagacacatactaataaaccattttttcttttggcccaaaatgatgcccaaatcagcccgttatttgaggtgcccggttgaactatcccaataatttcaccagtaaataccaattcctgatcttctgtagttaataatttgtgaatcacaaaacttctagagtcagtatgaatcaaatccaacaatgtcaaagccttcaatacatttttggaaatcccaaatattagacaagctaaatcgttagcagctctaaattgccatggatgctgttgtatacaagtaaaaattgcttgtggtgcagagtttttcgctgaggtaaatgtgtgtaagattttaccataatcttgctgtggtttaggtggattcaggactacggtgtcagccccgttatttgttataaattcatctagcccacgttccaaagtggcttcatcttctaataagctctcctcaattgaaacatctctttcaaagaatggttctgccaaagaatccaaaagaattttctttaattttctagtatgcttcttctcatctacaatattacttaaatttgtatttgatgttgaagacattggagacggtgtaccttctttatcttcgtctaggataagtttatcgatattgtatagagacaacatgtgaagatctgttgccttttctgatgtattattttccaaagtttcatttaacaagtccagtaaactgataagattcgatcgttgttcttcaatgtaagaataatcgtcatcattgttatatacattattattattattattgttattgttattgttgttgttgttgaattgattttttaatagacttggtgtattggaattatggctagtatttatatggtcacttattttccttaaagatacgcctggaacactttctggtggtatattatttaaagaaatattaatctgtgatcttgacctattggattgtaatttaggtctattagtattggtgttagtattatcaaaattaaatgtataatcattccaaagtttaggtaacatagccaatgaattagttctgtgttttaatgatatcctatcaccgttgctattaaaggtgcttccacaattactattattacagttgctattacaattgctagatatggcaggatttgcgacaaatgcatttaaagcggcagcaggcgaggtccatttcctttgttggtaattactcaaaggatcttcagttgctacagagaatcttctgcttgttaaatttgccatattggctgttgaaacatatggtctcagttgactgtaggttcttttccagccatgagggttccgtagtaaagatgcttgttgattttgtatttgtcgttgtttgatactgctgatcacagggctgtccagacttgtatcattttccatcatccttgggttagcaataataatttccaaagatcttttcaaaatggacagtcttacagccaaagaatttggtgataagggattatatgaataggaatgtgtagattcattaggcaaagtgaaaagttcctgaatatcgatatctgtcatatttgaactagtagaatctacagatgctgttctcatagttttatacgacggagtgctagctgtactattcgatttcttggacgaattattccaatctggcaaatcgtttatattagaggagtaactttgagatataacacttcctatcaaaggtcggtattcttttgtgggcgtggccacactcaagcttgaaagcgaagatgcaacagacccatcattttctttatctaacttggtattatcatcattatcattatcatttttatttttattttcattatgttggctatctaatttaaagttacttttatttagagattttatgataaattctgaattacttgattcttttattgaatgtttttctttcaaactcctgaaagaataagttgaattatttgaagctccaatatacggcatgtctgatttaatagtttgttattattttttttgttattagttaataataataataataataataataataatatgtacaggaaaaaattaatcaatctatggcgggaagaaaaaatatgcgtatatgtgtgtatatgtgtgtatatgtacgtaaaaattagtgaatttggtattatttgaataaagaagagtgaacaaattggatagataaaggatatgggagacaatatatccttagttatgctgattgatgtaatctaatatattataatgatagaaatgatggatatagcaaaaacaatggtattaaggaatgtgaatgagcgggatgggaagatgggataagaaagtgaaggttagaagaggagcgtgtaaaataaaaaaaagaaatgattaatatatatgatattgtgtaattgaatattgcgtcaagcacaaggaggtagacaggaataacttcaaacaatgttaaaatggaagggaaacagaagccaggttaatctaataaagtaccaaatagcagaatgacagagagagagagaagtatagaaatgttaagtttgttatacccctttcttattttaaccgagaacccaacacaatatccctcgaacgtttgttaattcataatagacgttctctctataaatggaagaaagaaagaaagaggaaaagagagggggggggggcagagggagggtaaattggattgaagtgaaaaggaaagaaaaaaaaaataataaaataaaataaaaacattggcagtgaaaaagacaaacggaaaaaagttttcgtacaaagggataaaaaagaataaaacacctgcttaccgtacagaatatatttagggtatgtcatattagggtttcactctgcactttataaaaaaggaatggaaaaacgatgggcggctagatcaatataattatcatataactgtacatattgtagattctttaaggtaataaacacatgccattctctcttaaaactgctactactacgtttgctggagtaaggtatggtaaaagatatacatacatacacaaatacatatgcatatatctgtttgtatgaataaatatataaatttatataaattgtcgtcatgtcgtataaagttccctttttcttcttcattttttgttcttatatatatgaagttttaattcaaatgaaaggggaaggcagaaagaaaaataagggaacaccacagggaaggaaataaagaatgacatttcggcggctaatgcattttatctagaatatatttttacaatatatatatatatatatatgtgtgtgtgtgtgtgtatgtgtatgtgtttgcaaggaagatttaaaaatttttctgttatttttttttatttttctttctgtcgttgactcatacgtacagtaaataagaaaccaatagaattatacatatacatatataagaatatatagttgattttaaattttttttgtttttgttttttgttttttgttttttgttttttgttttcttctagtttcgatgtgttttacaataacgtttattttaaccgcaattaatggtttgttttataaatatgatcgttcacaaaaatttttggttttgcctgactcctcaactgataagaatgaactaaaggataaaacatataaaaatgaaattagtaaaataaacacaagggtgattaatatcatatctaatttttcaaaaagcttttttcaagattctccatggctatatccctttaaaggcataagcaattttttacaatttaaagaaaaatatcttagaaccgtgctaggtcgtttttttttatatctgtgtaatttctccttcatattggtcctatattggctcacaatcacacctatatatttgacaatgtttctcatattaggtccattcggcgtctggttagttctgtttcattccattttacatgcaaactgtctgactatgctttccagtagattaatgtatccaaatgcttctttgatattcaagtgtttacgtgttcacaactatacaaaagtcaagattggtaatattgcaacaatcagatattacgtacccataacaacaaaatatttttgggtctactatctccccaaaaaaatcattaaatatttgttttatttcactattttcctgtttcaaatattcctttcatttataccaattgtggggcctttccttttccatttgactatggcaccatatattggcagaatctatttaacaaaaatattaagattacaaaaactaaataatttacaaagaaaagaatacttctatacctatttgggcatgtttgcatcttttggtgtcactgctggtttgttggagacaatcccacttctttctgggatttgcctatccactaactatattgcaacatctttgtggttgatggataatgaaaagtaaaccaacgtacataatgtttagagtactcttattgaaaggaagtatgcatattattattctttaccatttaactattatttctttaaactatatatacacattcatacacatacacacacacatatatatatattgatttagaaaaagaggtatatttaccattgataatgatttataagttgtttataaattcttgcaatgcattctgtcttctctttttgtcttttccttcttttgactttttatcattattattatattcatttgtttatttcctctttacttcacatgcaaatcacccctgcaatttcgaccaaaaatcccaattccagaaattgttgatcttatccttctttgatactcctaatcttttctcatactcaccaatatcttccttcccactggcttcattgaaattctcagaaaatatatcttcgggtgaatccaatttaatccttttagattctcccattaaggatccagtagacggcgatatgaaatcaccactatttatactgtcttggttagtactactggttgtttccgaatctatatcactaatcttcctcttcttatcattctcaggatttgtcaatgatggattcattattgtattttcactcaccatagattgaactatatcattctcacctactttcatgacactcttgaatacccctgcaattgcctttaatttaatatcatatagtcgaccctctttaacagctttgcttttcatgattagtctatgatcatcgttaatgtgtatatcaaccacatctctatcacgtaccctttgttgcactttggtcaattttttctttccggttccgttcactgtatcgattgtgtgtttagaaaacttcatcatgggtggttcaatatcttcatcttttataccaagagtatcagctagagtccctaaaaatatatctattggagaagaacgaaacaagtcttgacgatgtttataacgcgatatcatctcacctttcttaatatttaaggactcaagagtttcaacctccttcttgaattgcatttgtaattgtgctgtattattttgaatagcattttgattgggggatgatgcaaatgactgttgactagtcgattgtgcacgattgttactgttatgtgatatccccgtatttttgggtgtggcagatttactagataaggtactgatgttatttgatgaaaatccactggtcattgctggggaaggtttcttactcgtagatttattacgagaatgtggtgtggcattttctttcttaggagatatatcatgtgatgctgtagagttcttactcatttcgggtacaccagccaatgcattgctgttattattgctgttattattattcaatggttgtctattcttagttagatcatttaaatttgtttgtggcaatttaggtgtatttgcaatcgaatcatttttagatgaattatcaaggttctgcggtgaaaacatattcccattagtggcacctgctggtacagtaacctgttgatttgtattccattgctgttgttgttgtggtatggatggtgtttgtccttgtggactcaatctagtcatattaccattattgttattactgatgttgctattattggtaatcatgctattatttggcatgttcccttgctgtgaattgtttatatttctttgagacatctgctgctgctgttgttgttgttgttgttgccttttctgttgttcaattagttgttgtcttcttaatatctgcaacttcatactttcccaatatttttgatatttcataaccaatttatcaacagtatctaatttgactacatatatacctcgggaacatttttctaaaatttccttgacaaatattcttagttgcaacacctcctttaaaaatggctcactcttagtaaaaacatatacctgtggtgcataattaccaacttgtgcaaacaattgttggttcatttgcaattttcttttaatttcttccttttcttgctgggatatcatattagttaagtctgttaatcttaaaggtattctagcggctgcagctgagatttttcttaccatttcaagatcctgttgtgttggttggaacatttgaagacctgaattgttttgttgtccattgttggccggtgatttttgagaattttgcatttggttgttattaggatgattcctaataggagtttgtccaatttgaggattacctacttgttgattcatcatttgattattttgtacatgtttcaaattattattattattgctattgttgttactcatttgtggcattgaaacattttgtgaagtttgaatatgggaaaaattacctccagtattattcgagatggatctctgtatattactatttccttgcaattgttgatttgggaaattattagtgttaatgttagtgttgttgttgtttggattatttaaattggtgttgttcgaagttgttgcattgttagtcattcctgctacatttccacttgcgcttccatttccatttccagcatttgctactgcttgagacattttgattgcttgaatcttctttaatgctttttgattgatatattttttaataaaattgtgttttgctgcgtcagtcatattaccaccatattgtgttttttgaaaatgtttacaggcttcaatcgcttctgctagaatagacttttgttcttcttgagtgaagatttgatgaatttgacccaacacattaggtatttcacctggcctattagcatttctctgtggctgttgttgttgtgattgtgattgttgttgatgaatggcatttggttgcatttgttgattcatattattgatctgctgttgctgtgggctttgattttgattttgcagttgagattgcatattttgttgtttcaattgctgtgcttgttgtgcttgttgttgttgcattttacttttgtataataattgttgatgtaccttataaacttcttttgcaatcaacatttcttgttgtgtaaaccttttctgttgtgccaattctgtaatttgctgccatgtgttaataccaggtggaacattcggtattttttgcaaaagttctcttggaattggagccactttcatctgattgattagcaattgttgttgtgcagttaactgtggtctaggtttttgttgtaggccttgctgaccagaattaatattggtattcaactgttgttgtttcaactgttgtgctgcttgttgtcttacttgcgcttgttgatttaaaaacgttcttgaattagcattactcgaactaggaacgaaattaccattattgttattgttattagtagaagatgaagaggaaggtatttgctgttgctgttgctgttgtttagcggcggcagcagccatagaggccttttttctagcatctcttgtgttacacatagcagttattttttctttcatactgtttatgtattctttctttgttgaacatttagcaaacaaagcagactcgaaattcttaacatgcaccttcatcttttctgcattatctacaccaccaccattcatttcattgatttccatcaacacctgtaatagttcagccacgtacctggccctttcttctgttgttaaggcatccattcctgctgataaattgatatccattttgaaatgacggataactcaatggtagctaaggctgtatttacactaatacgagtgtgatcttgaatatagtattgtgtattcaattgcttgattgccaaacttcggaaaacaaagaaggaaaacaaagcaaaaatcaaaaacaaaaaaagaattatttatattcagaatgtatatatatatatatcgtaaatggataatatacttgcaatataattatttctcgttatatgtatcttccattgatattataacaatcaatatataaaaagtgtatataatgaatgcactacaaatagacataacttaacaattcaggagctttgtacaaatgaggcgaatcaagtagtcaatgaaataaaataaaagtaaacaaaataggatcgatcaatgtacgttcaattgttcctctatatcaaattaattttcttcgtttttttttttttttttttttttttttttttgggtttttggatattttcttatttctttttttctttttttttttatttcttttaccctttgcaataattattgcctctttaggaaacacaagtgttgcaactgaccaaaataggaaatacaaaaggagcttttacttaattgggctgtttctccatctgctccgccattcccgctggtttcgttggtaacgacagcacggcgttgtcatgtggagtctgtggtgtggctttttgcccaattgggcaactgttgtcatagcaacgcacttatatgtgtatataaaataatattcaaaatatttgcatatgagataagatacatttaaagagagaggtatttactaatgcatacttttcatatctatctattcacaatatatacaaacagatgtagactatataagttgatcgtcttatttgtctgttggtttcttttctaaggattcgttttccttgtatatgatatcttccaacagatcacttactttcttttcaattgcatcctgtgccttcttatcatcttcactaacacttgtatctaatgctaacttatttttagctaactggtatattttttcttcaattgaatccttcgttattaatgtgaatatagtaacatctttggtttgtccgacacgatgggatctatctgctgcttgtctatcatcatgtggattaaatgattgatcaaagattacaacattatttgcacatactagattaataccaaacccacctgctttcgtggacaaaataaacactggaattgtactatcttcataaaatctatcaattaaactttgccgttcattcacttgagtacttccatccaatcttaaaaatttataccctaatgtagataataccatttctaagatatctaacacttgtgtgaataatgaaaatattaatatcttctctcttttgacatcaatcacatcctttagtatctcttttaacttagttattttgcctgattccatccattcattgttttttaatttgtatttggacaatgtcttaggaaaattacaacataaactatgcaactcaaaatctgtcatcacactcatatcctccattatataccctttattcccatcttctgcatatgcaggttccttcaatatatcttgactcattttatcgatcaacgaatccgtatagatatttctgaataataagggatggattgatgcctttcttagactcataatcaaattcctagaaacattattcttattccttgtcttattcttatttggcttcttaacaatactttgttccagctgttctttttcccttgccaatttggctcttctttgttccatcactgatttgatttctttatcatatatctttctttgcaattcattcatttcacacattatatttttagtatgctttgctggtaaatgttttaatacttggtctttacgtcttctcagaataaatggcctcatcatagtacgtgctctttcaatagcattttgcaccaataatgggttatgccccttgttatcgtctgtggttctaactctttgtttgaagatagtttgtaatgactccttctttgatacaaataaatgaggcataataaactctaataaagatattaattctcttaaattgttttgtagtggcgtacctgtcaacagtaatctaaaattaccatgaatcttcatcaatttattgaatctttctgacattgaattctttaacatatgtccttcatcgtatacgataacattaaaatcacattttcttagaaatgcaacatcatacttattaccagctgctaaattatatgtagtaaccataacatcatactgatcatgtgcattctccaacatatcacgcaattcacctctctccttctgtgatccataatatggttcaatctttagtgttgggcaaaatttcttgaattctcttaaccaattctctaaagttgaagatggtactataatcaaatgagggccaggttcattgatttgcttcaaatatgctaaaaaggaaatcacttggcatgttttacccaatcccatatcatcagctaagatacatgacatcccattgtgatataataggtttaaccaattgatacccatttgttgataatcctttaattgtagatcaggtgataataaccttggtttgcccctaaaaaatttaattagttttttagttttgttttgttctgtcttgatctctttagttcttcttttcaacacaaaatcatcgtcgtcatcgtcatcatcatcttcttcgtctaagtctacaggatcttcatggtcaatttcttccacatattcatcgtctgcactacctgtgtcatcatttgatttcattacttcattatcttctatattaggtcttaaatttctattagttttttgttttatggaggtaccattctctacttgttcggtatcttgttgagaactatctttcttcacttcctcttcatcaaattcttcagcaatagctccggactcactcttattattgccactattattatcatcttcttcgacttcatcattgtttaaagtcattaattgtaatccattttcttcatcatctagatttttgttaccagatgatgaagaggaggaggaagaggcatttatatcaaccccccatttagaaatttgatttgagatcatgttaccatatgaggaacatctctttaacaaagattcaatagcattataacccttaatagattcaccaatcttctctaggaatttttcaccatcctttcttagcgattttggtgttccacgtctacgcaaccgactaccattattatctccatttgttaaattttcagaactgttttgtttttcaatttctttttcagttaagaattccatactactaaattttgttaagcttgtgtatggtcttttagaaataatcacttgagctttgtcaaatgtagtatcagctaaatctgcaatatctaatggatccgcagtgttcaagaattgtagaatttgttcatcaagatcaattggacctgttgttgaatcttcatagtcggtaccttcatcatcatccaaatcgtcgtcacttgctatgtcatcacggtttaaaccatcggaatctgaatctgattctttctccattaattgttgcgctttcgttttcaataatttgtttctagcattatctaattcggtaggtttagagtatgatttattgtggacttgtttagtactattaaatttattttcaagctcatctcctctaactaatttccttctttttgtaatatttgtcaaattagaactaaaagaatcattataaaacttcctggacttcattacattagaatatctatcaaaaattgaagtttttggtttatttagaacaattttcgtagaatcttttgaagttaaactattaaaacgacgtgtaatctcattttgacttctgctattactggtagtggtgttattactattatcttctgaatatttattggatacaaggttactccgattcaattgactattgcctgaccaagtgcttctttgttgttttattctagttaatctacctctagataattctaaatcaaaagaattagatttaaagacggcttgaattaaggtggaggaaaattcagggtattccttctgtaatatctctaaatttgtctgcatatcctttgggctcataccattttgtacgctgctagcagttctgttaagggcataatctcccatatggtgtttaatactcggtttaaaactgaaagtggctctcaataatgaagtgttactatcggtgttatctgtatcttttaatggggaagaagaagaggaaggaatcactttttggggagaggaagtagctggtacttgtacattgtcgtcatcatactcatcaccgctatgaggatgtctagtgctcccataataacctgacattttctactgacactggtttcccactaacggtaggatcttaacagttacttatggatgattagaacagtgctagataaaatggttttagttatatgcgtgattttgtatagatcttttattatggttttcctagatacgcctatggaggatgaaaagatcagagcattttgaaaaatttttcattttttttatctatcgaggatttttgcgatgagttgagctagaaaggatttttaaaggttacacccccaataaagagacaaatagggtatattaagtgtgtccatcattatagaaaaacggcatcttccttgtatattcgaacaatactcgtgctttgttttattatatttacttgtactatctagacatggtatagtggattaattacatatcaatatgggatttaaagtctattcttttgggtcaaatgggaaaaatcagttggggttcccgcatggagaggatttaatggtaccacaactgacgttgtctacagatgttgggttagatgcagcttttgaggcattatttctttctacaaatggtcagttgcaaaaaatagcttgtggtggaaatcatacagtgattctattgagggatggtggcatacttatgactggtaataatgaatcaggccagttattaggcgacattaactgcaaaagtattaacagatggaccaaaccagatgacacatggaatttcggctatcaagaaggtagcaaggtcactggtcaaagtgagaagaataataataatattgaatacgtagttgatgttacttgtggttgggactttactatggtgatgacttcattaaataaagtgtatattaggggtcaagggttgaaaggtgagttaggtgcgggtccagatattgtgcagagttccaaattcattgaggtatttcattcagatgatttaactgacaagattcagattttttcttcatttcaaaattgtgtcatattagtgacaaatcgtgctaacggatatagtaaagtttatggatgggggtctaatattaaatgtcaattgtggtctcctaaatgtaaaagcgtatttgaaccatctttgatatatgaaacacaagatcatgttattgattatgtgtccatggggaaggattttatggtttatatagatgctaatggttcaattgtccataccactgggaatttaccaaagacatttgatttagaatcatggagaaatcgaattaatttaactgtgctatctatgtggtcatcaattcatattattcagaagacaccaacatttaaaatttcttcatatgggtttaatatgcacaatcaattactaaaaaatgatgatgtgacaggtcttaaggtaaatacagtggctctaggtagcgaacatggtattatggtatgtgatgaagatggcaaagttagtgtcaggtgttggggatggggtgaacacggtaattgcggatcattacaaaagaacaaatctataataatcaacgaccgttctaatgaatcaagtctcctgaatgaagttatgtctatatcaaaagaaaatgaaactagggtggatgtttttggtggatgtgctaatacttggatagttatttcagattgaattttggtgtagcattaaatgaaatctgaataaagcaaaaattattgaaaatattgaagatcattatatattagttcattcatgtatatatttcgtacctaagggcaattgtcattttattaggattatagtacaacttcctttttttttttgtgagataaatcattgttttgtgggattatatatacgttttaagcggttgataatgagttcaattgaactttaaaagagagtatcagatgggatagatatttttgctgggaatataaaaaatttgaaggaacatttttctattataccatttgctaagtggggtaaattgtgataaaataatagtgttattaagttttttaaatatatactattttatgtactataaaaaaaatgcttatttattacatgaaggtatcgttatatgaaataactataaatagggttgttataaagaatatttaatgttgtcttctattttgtcaacgatatttgattattgactagctttaaatgatgatgtatgcatatgattgatggaacacgaggggtaatctcttgaatttattgtaaaactcaaagtaatagtagttcaattttttgaattcacttttattttaagtatatttttgctttaaatctgtgaaataagtacctatttatttgtattattatttttaacaaatctttgatcacgaaattttattattattttcacttttgttgatgttttaaaggtacccctcttctgtcatttaagaattaagatcatcgctcttaagagtattcacactatgttggtttctgctgttgctattattattttggtcagtattgattgagttagttggggtagatatatgattattattactgttatcgtgattgtgagggtgattgtaattattatttgtggcattctgatatgggggcggtttcgttataatagtttttaacattgccatgtattgttgttgtattaatggaccttgcatattgatgttgtccccatttgcatatatattcttcaacaaatgagttggattactcttatcgctgtcattattattaattgcttgacttctcaattgagtttggttatttttgtcttgataattcttagaattaaagttcggattattttcatgagtagcaatattctcatttataccaggtgaaggttgtccttgatttgaatatgtctggcgtctcgattgctgtgaatacattgggggtgatgttatatcttgtggagacatttgtcttctatttgtttgtagcggtggttgctgtgttgaattggatcttgaagtacggttgtgcgatctcatttgttgcgataaataagtaggtatgcgaggttgttgtacggggatataatttgattgttcctgttgctgtgttggattgattttttcattggatataggtgtagtagcattattattgttgttgttatagttaattggatatttttcaggcaataaagggtatatatattcataattaggtgaatcaagttcatttagagtgtcaattgaggaaccctcaataaaatcgtttaacaaataaaaaagttgccaccattcgagcaagaaagtatcaggtgaattaatgatcattttcgatcttagtaattggtcccttggtaattgctctagtaattgtctaagatcttcgttttctttgttttcgcctttcgttttctccttctctttctctttatccctttcagtgtctttgacccgttgatcaaagtttccacttacagcgatattaccattgaattcagaatcaggattctcgttattataaacttctaaatttctagtgattgggacatcggcatctcttaaaaattgtctggcagtttcatagtatttattttccaatagatagttatagatatgagcatataacaactcgtttgaattgcctgccatagtgtcagacaccaccaaagtgtcattgaactgtaattcttggtcgctgctattagtaccaatatcgttcacaaaatcattctttttacgactcccattattattattattagcattattattattattactattattattattattattgttgttgttgttgttgttgttgttgttgttgttatcgttgctctttttaagtaccattattattcattatatcctatttttttcaggctgttaactgaaagaaagagagagagagagagaaaagagagaaggaactatgtgtatcgtatcttaggaatacgtttggtaatcctcttctgggctattaactggaacaactcatttctcaagtagcaatttagtgttatctatgcacgtccagcttcttttctcctctcctttcccttttcttcctcgagaatttgaagattggattcttttttttcgcaattttgctggtcgtgttttttttctttttcttttgtttttttttttttttttcacggtgcctttgacgaagaaactttttcgaatatgttttcctatttaggacacttttggctttgtttcctatttaggaaacatttgtggttttttcgacatgcttttggttttgttgtttttgttagcgccgtgagaaatgcagtgtatatatttacatgttttgtattttgttttaaaggcatgaagaagaaaaaacacagctgggaaagagtagaaggtaggaatgaatgtatggattaagtgatagtggggtagaatgaacccctttggattgttactacagttgcttgatactggggaatagagtttggtgattactgtatgagacatgtgttagatcaagaggaagagaaaaggagcaaagaggggactaataagaagagaagctaatgaatgatgagtctgtcattgataagacctgtattccattccatggtgaaggagacaagacagctataccgtgttttagctattgagtcctcgtgtgacgattctagtgtggctttgttggactatgatgagaatactggcatggccaatataatatcgcatttaaaatctacattaaatagtagcttagtcggtggaattatccctactgaggcattgttacaccatcaacagacaatgccacttctaatagatcggatgatgcaaatcccacagtttaatgactgtccacttgatttaattgcggtgacaagaggtcccgggatggttggtcctttgtctgttggtttgaatttagctaaggggttgtcattgggcttatccacatctgtccttggtgtccaccacatgttgggacatttgttgattccaaggatgagttcaagtgatacaagcaatcaaataaatttcccctttattagtctattagcaagcggtggtcatacaatgttagtattatctaaagatgtgttaaatcatgaaattttgattgataccatagatattgccattggcgattccttagataagtgtggtagagaattgggcattaaggctaatatgattgccaaagaaatggaaattatggcttcccaaaggagaaacaaagttcattctgtaatcaacttgcctaatccattgtccatggcgcataataagaataaactatcattttcatttgcgtcatatataacgtcattaaaaaaccagattaaagatactctgattcatggtactaatcgtagggactccttgttgttgaatcaaattgcatatgatatccaagaatctcatttcgatcacttaatatataagattaaacaatgggtgcaaaaaaatatacatctgtatgatacagaacctagtcaaatggggttacagtttattgcatctggtggtgtcagttcgaataaaaggttaagatatagattggagaatgaattgaagccatatttcaaatcgttccattatccagaacagaacgatttatgtacagataatgcagtgatgatcggatgggctgcaattgaattagttaaacatttcaaaattaaagaagggtgtacgatttataatagtttggacattttgccattaagaaagtgggatttaacggatcttgtaaatatatctagatggaataaacagaagtaaagtttatgtttgtatatatacatgtaaatattcacattccatatatatatatattatgtatgtatgtatgtatgtatgtgagggactggttagggtatgaaactttcagtaatatcaaatttttttattaatttttgccatgtttccatatctaattggaatattatgtgattctgttgagcatccgatcttttctgtctttcaatttctctttcttcctcagttaaatcctttaaatcaggttttattctaagtactggaaagccttgatcactgtcattgtcaccaggttcaagtatcaatctaccatctttgattaaaaagcttgtatagaatagattttcaacacttttagcaaaagaattcgggtttaaaatgaatttaaataatgagatcttagaattgtaaccaactttacttaacaacaatttataacacttaatgacttgctctggggtggtcaaatcttggttatttattaaatcatcctttgtgacattttccgcggtctgtcgacttgcaggatttaataattgatcttgttcattatttaaagaacgtctattattattaagtgatcttttctttctttccaaagagaatggacctagtaaatgatcggttacagttatcgactggttataatttttaaagatggatcccattttgaaccaattgaactgattgaatttattaaatttatcgaattgttctaaatattgttgtcttctaacatgcttttggagattccttgatattgggtcagtatattgatcctcttcctcctcctcccctttcccttcctccacattctctgtatcctcattgctaccgcggttggattgaccgatttttgggtcatcctcaatatcacttaatgaagtatctgatattataatattattttgatttagatactcttttagtagataccgtttaataaataaaattagatcatttaagttcagcatcgatttaatttcacccaactgcaggttcttaacatttaactgtgttaattcactaatattgacaatggctcttgaatcatatgcgaaaatattattattattattattgttgttgttgttgttatgtgtatgtgtggagtcagtggtgttggcatggttgttcacaatttgaacgttattgaataattgatttaaagttgacagactatttaagaccgtggaaatatcaccatctccacgcatagtcatggctttcaatttcgagaaatctttgtccatctcccgatacttctgtaacacctcgaattcgaggttatccttgggaatggagctatttctagttgagtcatcgctaccagggcctatggcgggttgatcaggactagtccttagccttttggatacggacaattcttcatgttgcgtttcttcttcaaaagcgtcaccatggcctcttttatcctgcagcatctttcaacagatacaatacacactcacacactcacacattggcacccagatatctgacactgtccaatggtgtcaagaccagttgtaatgatctgccctttgctcttttttctataaaacagaagacattgccagatttgcagataaaacaaaaacaaaaaaaaaaattcgacatcggcgtttgtaaaaatcactaggcacggcaatcacgtggacgttgtgcctggtttctccgagcggtttgaagaagaaatcgaagagagaaaattcgaatggagaagaaagcaacgagttttggttgaacccatcgattataacagagggttagacagtaacccattctgatacttcattctagtagttcatcccgttatttcgctttgttggttcgactcccaaaagtggaaagaagaaagaaagagagaaagagaaaccgaagacaaagaagatagctaaagcgaaagaatcagagagacaaacagagggagaagtgcgtgtgtgtgtgtgtgtgtttgtgcgtgtaagtgtgtacaatagtctattagtttctttgtgtgaacgtttcttaatgggtagtctagattacaataatataagtaataatatgagtaacgaggatcaggacaactctatacacgctgatcctttcactgcggagggtttccatctgttacaaccggctggtttaatgtatcctaatgagtccactgatgacaacatcacaggcaataataatactgctatgaattccaacaacatgaatagttctcctaataaagttagaagaaatagagctaaaggcgaaactttaaatattttgaagagacaatttaatttgaatcccaatccaaccccacaagaaagaagacagattgccaaattggttaatatgaatgagaagagtgttactatttggtttcagaataaaagagctaagattaaaagaaataatagacagaaaagtattgaacaggaacaagaaaacaagatgtattccaataataataataatattgataataataatgttatgaccgtctctaatgagagtaaaaagaggagatttaatagagataatatggacagcgacagtgatgatagtggtatttatagagaaaaaaatcacaatcaacatgtaggaggtgaaggggatgaggaggacgagcaaagtgatatgtttttggaagatgggaaggagataaatttttttgataaggtcccattagatattaataacaattattattttatcgatatttgttccattttggttggttcatggaatagaattaaaagcggctcgatactaagtaaaaaattcaaattgctacaaaatttaaagaatctgtcacctagatcagtgaatgacattatgttaaattctactgatttgcttgtgttgatatctaagaaaaatttcgagattaattattttttcagcgcaatgacaaataattgtaaaattttgtttagaatcttttatccaatagataatgtcgtggattgttcaataagtttaaattcagatgaactcatatcaaataataataacaataatcatggtaataatacaaataatagtatttgtagtgaactgaaattgactattaataaatcaccaaattttgcagtgtattttttaaatgagaatgttcttgacacacaaaaccaatggtctatatgtgaagatttctctgagggaaaacaagtcaatgatgcatttattggtggatcaaatttgccacatatcttaaagggtttacaggattctttgaaatttatgaattctttaatccttgattataaagctacaaatcaaataatatccccaccttctcctgtacaattacctcttcatcttcttcctattaccactactgctgttgctgctactaatacctcttcaatggatggtcatcttgataaatcaattattatgcaatcacatgatgtagatattccaatatctgtgaatatggcaatccctgatgcttcatctttccaatctttgtcggatcctaaattccattcacaaattaacgaccgtgttccacaagatcatgaacacaacaataatattctttttggtgataatagacatatatcatatgataccatttctaatactaataataacattaacttgcttcattatcaagatagcattaacacatcatcatcagcttattcaccagctttgcaatttgatagaaataatcttaatattccgtataatacaatccacaaccaaattgataatagtctctatgctcatgataatatttcttcgtctatcatgaatcatattgataataaaaaaaataatagtaatattagcagcagcataaataatactagtactatgggcacctccctaaatccacatgatttagataatataaatttaacaccaagctctttctttttcgatcatcaagattatctatcaagtaccacaaatgaccaaatttacacgtctttacatcagtcaacagtaaattatgataatacccataatgctatacataatattaatattaacaacgtgaatatggataagagtaataatttactagatgatactaattgaatatcttctttaacaaatactaaataaagtttataataaaagcatacaataaaggggaataagaaatttagcactttaagtttgttttttctacccctctttacatattaatatatttgcatatgaataatatcaaggcattataagtatggtgacggcgattattgttgtttaccctgaaagtctattatttgcgatcttgtttcaatgatatactttctttcctttttaaaatatttatatagaatatgtacacgattaaatttaagttttagtatgaagcacctctcaatactaataagtaatatggtactgaataaaagaatatgataaaaatagaaaacttactttttgtcttgttctgaaagaatattagaatccccatttagatctatcttttattgtggtttctaaatttgataaaggttttggatcgaattctgtgtattggctcaaatgctcttcaattgatctgatagtatttgtgtgtgcatgtatgaaagttgaaatattaactctgtctgcttcatttgtaataatattactgaatttaagtttgtttattgtttctatgcatttcttagcttcaacccactctttcaatttaatacaacattgaaaatatccaaaaaaacatgataattgttgtaattccattcccaatttaaaccactcttgtgccttctttggatttcgaaaataattcatttctaaatatccaatttcactgaaggcttctttaaaaccttgtgtacaacactgttctaataaaattttggatttggttggtttatatttaatgtataacatagctaaataaaaatatgatttaacacattcttttaatggcacggttttgatagcctctaagaatcttttttcacatgatattatattctgcacaccaccttctctgaattcaatctcgcctaatttttctaacactttacctttttgttgtgtcccccaataattgatatcaaaattgggttttaacttattataaggttctacagattttaaatattctttataccatcttttggcttcttcaaattggcccattgaacagtttaaatctgcaacaatcttgaaacttaatggatgtttttgtttgactaattgttttaatagctcttgcgattggataatgtccttttgattttcaggcgttgttgcggatgatgatgatttagacattaatattcgatagcagagtaatgttatagcatcattattccccaattgggcagctttcttcagaagatagagttccattttatgaagctgaattggctgttgcttagttctcttccttaagtcaactaatactctattcattaagaatattatattgggattattggcatagtttgagtttttggaagttaattcattgttggtatatagtgtttcatataaaggtagtagttttccggacgaaagttcactatccatttgaaataatattctatttaaaagtttcttcgagggaaacaaagttttgaatgatgtattattcatggtttgcaaatagcaaattgcagtatatatatccaaaaagtctaggtaaaatacatagattattaaaagaatggggagttgatatatatttgtgtgttggttgtagaaaaatccttggaatgtctctctataattaatatttttcttgtctcaaatatagtttcacccataagatccttctttatacatcaagagatagaaatgaaaataattaattgatattggtgataaaaaatcatgcttattcatataatatggttgagttagttagccagttacatataatctttaaatagtgcttagatggttcttctatcgcagattcttcgaatccttcagtggtagcgcattttctttccttctttccagagtttcaattttaagtcgaagtaaaatacaatacacacagataataaaaatatttaccgataaaaggataagagaatgtggtgttcagtacattataatgatgatataataacatgttcacttacatctacatgcatatacatgtatagatatatatttatatacttaagcatgtataattaaagtaaaactttcttttgattaaaatttcattgtttatgttcaataattcaattatggaatatcttaatatctgctggatcagaaggtggaggtagatctttgaaataatctgattcaagacattgaattgcattccatcttttaattgggttcatttcaagcatcccgcacatgaaatccaatgcattttctgtagctgcgataaaccgtttccttaattcatctcttgatggtggtggatatatctgcaatttattatatgtggggaatatggaaacacctggccaatctctatctgtaggggttcctaatgctctaaatgtcacttccatttgatcaatatcatctttacctggtagataaggtattcttaacattaactctgcaaagattacacccacagaccaaatgtctacagcataggtgtaatgcttggccccaaataataattcaggggccctataccatctagtaactacattacttgtcaatatttctcttggacccggaactgctctggctaacccaaaatccgctattttgataataccttctggcgatattagtaaattgttaggtttcaaatctctatgcaagatgaaattacgatgtatatgatgaacacctcttagagtcatcaacatccataatttaatatcagcaggggtaaataatatagactgatcttttatgactacttctaaatctgtcggtaggtattctaacaccagatttaagttatcataggccataaagatgtcaattaaggaaattacatttggatggatcaattcttgcagatatttaacttcacgaatagctgacatgtctaacccatctttaaattccgaggttttaatctctttcacagcaatcttcctcgatgtagaacgttgagtacctaaataaacaacagcatatgtaccttcaccaacttttttctcttttgaatattccatgattcaattcagtcgattttaatttctcttttgatatttatttcccatatatatagttatacatatatatatatatattcatcttaaacatgtatccatttgtaatttttgacatattcaaatatataagatttctttaatttcttttttaatttctaaaaagatcgatgtaacaattaaaaaaagacaagcatactaaagagaccatgattttcagtcatacagcaaatataggcgtaaccgtttggtagttagctactttaattacagtagaatgtagtgtggggatagtaagtatggagaaagtagcatgtgaaaagttatgtttttaggtatcttgactcagaggatagagatgcaaaatatacaaatatatctttctgctagctagctcgattgatattggagcaagtttataaattcagaataataaaagctaactttatatatatatatatattaatctgatagtaaacatatatatatgtagtatcccatgttacatatgttgaaggctgtatgaattaactacaattgctgctgctgtttgaacattcattatcctactaacaccgtgttgtttaatttctaagcacatgtctaaatcaattaatagttcacctggaatccccctctgttctgtcccaagaagaactacacatttttctggaaacttgaattcactatctaatggagttgcatattcagttttttctaaaccaatcaatgtgtatccttctctttttttcattttcatgaatgtcccaatgttattaatagagacttgttctattggcatccatttatcagcagttactgcaactttcttaaactgtggatggttctttatcttgatgtcattaacggttaataattctgcacccaatacatcacataatctacaaataccacccaaatttggtggttggcttattagagatgcaacaacaatcattttggaacgctttacagtggcagacgatttcttgttatcaatatctaatacggtttcccaagcaccactctttgtttgtaaaggcgacatttcctcatgaacatttgttgctttatctgtatatttggctttttccccatcagcatgtgtatctctggtatttaaccatacatcttgatcatcagtgccgattttaaaatacccaatatattctttagtgttgttccaatctttaaatgtgatagaagagatgtaaagtggacggtgatcagtagtctttcttattacaccaccaaaaatgccagttaatgtcatatctttatatatatcccaaacattagcatctcctgaacggtattgaccaatgacttgtgattccctcgcattattgtatagatttcgtaacagcctcttgatatcatccgacagtaggctatctttaatgaatggccatagagataaaatcaaggaattagaaaaatgtctaactaatggtttatttgaggaagcatttgaaaccaaaacagtaacaaatctgtttaataatttcatggagttactttggactttaaccttcaaaacaaggaatattatcttttctgcactgacggcaagaattggcttatcatgattgcacattaactcaaataatagatttgccgtagcattagtttcctcatgtaagtttatagatgcaagggagtatgaaataaaccattctttataaattcgaactataggggaggcttctgtttctaaactatgaattacgtttaagataatattttggttaattggaagttcttgttgttttgtggctgtatgtagggaaattaaacttaattgccattttaaggatctttctttttcttcaggaccatcaatacgttttttcgagataagcatattggtattatttattaggtagttgattagatttgtttgaaattggaaattacccttagtaatagttgaaataattgaaataaacttgtttatctcaggtttgtaataaacttggttgtataaaggtgtaaaatctgaaatgttcttttgaaatatgccatcgtaaaaataacccatcacagactttaaatggaaaatattctgttccatttgatcttgaacgaacaatgaaacaattatttctgatagccatagtgatccctcttttgtgagtttggagccgtgttcttccataaactcctctagtttggtagccaataatggtaaaaatcttctctttgagtaacctaaaacgataatttgttcgctataatgtaaaatcttatcactcatggacgaacttgtatactgtgttgcatagttaatgttattaatatcaaaaagtaactgaataattctataatgaagctcactttctttcaatactaaacgttcatcacaaagattgtcccatattgttgagataactttgaaacagattgtcagagtctttaaatgaatgatctcagtatttttgtatatatggctaattaagttggtgatttctaagttacacatatattggttatttccttcttcaatggtgagttgaataaggtttaaaatttcttcaacaaaatcattacgagtatccttccaaaatgtatcattggtaattaacttaaagaatgaggcataagttttatcttttactttaaaggacactgatacctttccaaaaaaatcagacattgaggagtataatttttgcagttcttcaagcgtacaattcgtctcaatgttatattttagacaaagcgaaacaatgaattcatgtttagctggactgaacaaattaattaattgactcaataaagtatgaacatccagagaattttttatttctttacatggtttgttattagacacaatttcactacctaacatgaaagcttcctctgtagttaaattagtgtcggatatagatgttataagattaaatgtagtatctttcacaacatcctgatagtcattcaatttacttgaaatgttattgagtgcttcttccttaattagcaaaggtaatattgataacaattcgggtgtatattgttcaggttcaatacgtaaatatattatgcaaagtgcgtcatacatgggatctacacccatatgttttgataccaataacttagagtttgaaaattttattttatcaataggtatatcataatggcctgtgtatacatcaatatgttttcttgtgcattcacacttctttaaatgagaagccatacatccaatccattggtttactgtaacatcatctgtatctacataattaagtagctgaaatagtgttgtttttatggtagtttcaaaaacttggtcttcgcattcaaattcaaaaagttttttgattaatgaaatatgatttgatttaattatcggatattgtgtgtttttggcatatttaaatatacctgaacaggcgaaaatccttgaagggtcgaatgacgtaccaaaatctattaataatttcagcaatgtatctaaaatatttggttgaatatcagcaggtgctctatccaaaatgtcgtagaataggtgagatacaatgttaccatgcttacatatgtttggatgaggaacacttatatcattatcatcgtattcagctttgaaataatgagcaagaaggacagaaggtaataaagtggatcgtaacagtggtaaatttaatgaaaagatttttctatcctgaacatctaacatcaaatacatgacatattttcttacactttccattgatgctctttgtcctgttgaaaagaagattaacccccaagttccatcgatgtatggatcattgaaaaagttaagtatatctttccttgcagcttggatttgatttaaagatgtatctagtgctacaatttcatataaggtgacgaattttttccaggagttttcaatttgggaagatttgtttgggtcccaaaaaaaatattttgttgtgaacggtttctttatctgagaatcattcattgtcaatttctgtatagtcattttcaatacagataaagatagtttacgatattcatgtactgtatgatcaagagatttttgtaaattggtccagaaagtttcaccttgtaaaaaatctatcattttcaaagatatccttgggttcataagtgatcttaaaagaaaagtcaacagatttttaagtttccagtcagcatcttgatcattggaataaatgtatatgaaaaaattccaaactaattgatcaaattcaatattggaacaacaattttcatggatatatggatgtctccatctcattaacttagagcaataatttgagatgttttcaatattacaacctaataaagatattaaacataaatcaaaattgacaaattcggaatatttaaagttatactcctcttcttcagtatatattacttcaaggagttgtaataaaaggataatttgatcatcttccaatgtatgaagattgtttggatctttttgtgtttctacaacagatagtaattgtttaagaggtcgtgtagataattttttcccaaagagtttattcttagaggatattatatagttagataaacaattattaatatattcattaaccctatttttaagacctgttaccaaagaaatgattttaaataataaattgaattgtttatcatttacaattatgttagaagcatctcttattgaattactagcattattagtagtatacagataattttcaactttgataataaatatttgaaatatttgatcaattaaatggatatcttccgataaatctatatcagtcaaagttatcaattcaaaagcttgttccaaatcatctcgattaatcaagtctctaatcaactcagatatattttccaaaggaaaatatttggataatatagaattggtggtagccatgaaaatttcaaaacagaaactctaccaaattatttgatctgtatctatatatatatatatatatttgcttgtttgaatagagtgtattaatatgtgtttgcacaatagttgaataatatatgaccaactgatttgatttgtttttatttacatgactttcatcttggtttcatttctactggtttattcatcgctgtaattaaaaaaaaaacgtaaaaaaaaaataaaaatttagttgaagtatgtaaaaatacgttatgcatgaagtgtgaatttatcggcggctaaatcaaaaaaaaaaaaaataatatatactaacgaactattatatataagataagttatattatgtatcacacatgcagtgttatatattacatgcccatatatcacttactaatttaatacacaactttcttggaaaaataaagcagaaaggagcagtgatgtataaaagctacttattaatataaaagtttattctctcgctctatggatgtaaatgcatcataactatatacaatagtcattttaatacacatatactatttggtaataattatacacttcaaaaaaggaagggagaaaaaaaacatgcgtttcaaagggcgtaaacaaatggaataaagttagatcaatccaattgaatatgttcgcctttatatacaaaccatttttctcttttctctcttctcccttgcaatttaggggtttcaatattatatatcatttataccagtaatataacagtagtaatataatatgagatcagctattattattaattattgttggttttgttcccctttttttggggggcctagaatcgtttttctgtcctcttttttgaaaattggattgttctgaaatgctcgaggcaatttctttcctctttgtcgtaccaaattactttttctttttttttttttttttttttttttttttttttcaaatattttttttgtgtttccgagactttcaaagagaagaagagggggggaggaagggcgggtgacaaaatggtttatagggtttaatacatttacaaacattcatatcacttgcagggaagtttccctcaggtcagtcaggagggctcttagtaattttgcaaaacaattgaaatgcttctttatctatatgtttggttgcattgtctttgttgtaccaactgcgtttggttcaggtttttatgtgtcttttttgacttaaataagaaagaacactatttttattattaaaagaatataataaccataacttaataaataaataaataaatagaaaaagatataaaagaaataaacaagtatatttcataaaaatgtcttcaacagctattcaatccgttgtaccaaaagaggaagaaggtatattaaactatcttttggatgtcagaagttcactggcaaaattaaaacaaaatagaacccaatttttgaattccaaggatgttcaaagcacatatcaagaagttctaactaaagttagagaactggacgaaattagaaaatcatcgaattcaaagacactatcttctaatgatgctactctgattcataatagacaattacataatagagtggactctgtgcttgatgatgttttccagctattgtctctatgttttttaactgttggtttgaaaaactcggcccctgccacttatgcatctttgtccactgtgcaaagtttgttggaacatttagaagagtctagaatttatacacaccatgatttgaaaccaattaaggatagactggacgaaatctcaaaaattgtagagaaaagttgtgcccaaccattaatcgaatcagccaaggataatgatgaaataacagcaaaagttgctagtgaaaggaataaaaataaattggaacaggatttattgttacgtgccaagttacaacattgtatcgacgaatataataaaattgaatcaaatcttgaagatatcgaccctgaattaaatggttatatggaaaaactttaccaaattagaagaggacttttgtccctagtggctcttttaaagaacacagatgaccaaaccatcactgacacagaacttaaagacggtctaggtggcgatcgtcctggtttttcttcttcttcttcttcctcttcttttattaatagaaaaaatgatattactgagaaatattctcttttaaaaaaacagttagaagaagttgaaactgaagttcgtaacatcagtgattcttcagccccaggtcaaacaagaaagggtgaatctgtgcttaatggtctcttggacgattgtaatgatttggttaatgatttatcgtatcaatcagaaggtcaaataagtctaaagatatcctttgaccctactttacaagagatatataataaattggttgaaattaaaacatcattgtctaatttaatgataacaagaagatggacactaagagaaactgatttgttttcatatcaaaaacaattgagtgaaatagacggtaaaagagttcatggtaaatttccaactgaatcaggtgactctaaaggtcaagccattttactgtacttgctacgtagatgttatgctattatttataaattattagaaagttctgaacctgtctcagaagctttacagccaattcataatcagttgtcaacagtacgtcgttgtttgttggaattgaaaagaatgggtggagttgaaaatgaaagagagttatacccatatcaaatgaagttagcatctctagataatttacgtagagatggtaagttctatgatgctgatggtaatattccggaaggtcaaggtatattaaatgctttactagccggttgttttgatattatccatgaattaaaggtagaagctgaggaacgtgaaggttcgggttctgaaaataattgaaatgatagattaaataaattatacatttcattttttttttaattttctaaattcgaacttcgattatgctttattggtttgtttcccttgcttagtgtctgttttcatttttttttttttttcattcgattggtatcttatttgacaacattttgtttactaaatttaacaatgatattagaatgattgaaagggtggtttttggagagtggtatttttgaaaataaaagaataaataaaaaatatatgcctatacatacacttatatatttatgtttatgttcatacatttctcaacattaatttattgtcttctttatgctaatctgttttgtatatgcatatatagatatgaagtttctttatacacacatgtatattttgtaacattggctaactaatacaagcactacattccacctaactattgttgatccttattgtataatcatccccattctgtgttatataacgaacccaaggatagcttttatattgtaatgttggctcattgattttcaaataacgaatttgtatgcctgatgttgtgaagtatggtatttggaattttacttgtactggtttcttaacctttgtatcatttatatcagatattgatggtagtaacaattcagctctcatggaatattctttcccacctgggaaacttctaattttccataaaattgcactcttttctggaacccatttaattgaaccatgtgaatatttgaaggatggggtatcagcgtcactaggaacaggtattaatatttctacattagtagcaacggactttttcttaatttgtgctttagttttacaaaatatttctactctggaatttgaatatgtttgaactttcacatcacataaaattaatggtttgatagaagtggttaatctataactcatcaaatcaaagtcgccatcaggtggaataaaagaaataattttttcattctcaaatttgcttaatctgacacactgatggaatttcaggtcttctaattcaatgttacttttagattttcttccatcattagtaatggaactttcgtttttatttaaatcatgtcctttgcctttcttatcaccatttgaagatgttgtgcctatatcatttccttctaagtacttggtaaaaatacccctatcattgatacctaacttcaaatcaggcatcccagataatctagatttcactttaacagtaccaaggatttccgatctaatgacctgcccattctgtgatatcaacatgttgatagattccacaatgtctaagaaagcttcatttttcttatatttaatcccctccggtctccaactaacggaattggtcaatgatgatggtggtcttgcagcattcaactttttcttatgtgctttcactaatttgaaagatttttgtgtgatatatttctttaacatcttagtctctgtgacttgtgggataccataatccatcatttcatccagtaattcatagatgatgacaaagttatctcggatagattcttcctccacagttttcaaatattcttctaacacagctactagtttgtgtaagaatgtaaaaatggtagccacattgatacttaaagaagtagccaaaacaacgacgtacagatcattatgctgtataaataaataatcaattccgctatgagaaatacatggtggtattatactagattgttccacattctctagaagcaaagtggaaaacttatcgatggctgatagtggcacatcgtccttgtaacgacgtgataaaagtggtttacctttgttatcacaaaagtagatagcagacgccatttctaatgatttcttgtttctataagtttaaatacttgagaataaaaggcaagtcgttatgtatgtttcttcttgtcttgttgatcgttgcaatgttcaaagaatgcaattactatgaacactatttaaaagaatgccatggagaacagagtatatatgcatatatatacatatatataaattttgttacgcaatttgatgtattttttgtaatttggtaaagttctatttcaccggtgttcggtgttcttcgttaagagtgatttgacctgtgccactaaaacaagagtttaaaataaaataatgaaaaattatgattatattattgatacagataaatggtgacagacaagcaaataaagtaaagctaggagtactattgtagatgcattaggttatttaactatttagtaagattttatttacagagatttctcacttccaatattaatgtattcaacattaaaattaatgtatgttaataaggtcttaaaatatttttaggttttttttttcttggtagttttgtagccgataatcatttgaaaaaactcaataaattgtccaatctctaacaacactaaagtacagtatttgtcagggaatctaatgtcattagataatgagctattaagttagtgtaagggtttgttagtcatagagtaacccacaaaaaaaaaaataaaaaattaagcccaataatcacaactttggggagatatggtctaagattataaacgtaaattgcttcaaagtgatgctataaacggatgtacatagacctactctttgttttttttttaatgttaaggttgaagagttatgtttttgtgatctcaagtgacacattgcaagatttgtaattattaagcttaaatttttgttgaaaatcaaagcacacagcatcaatggtaatgacaaacatcattaagttatagacgcttgttctgttttatactaaatacatgtatatacttattttatagtgtatatagtatacaattttatatttacttcagggcttcttttaaagttttttttatttctcttcaaatctctgaaaaacatatttggtgaaaaataaaatgtcttcctgatatcatggtacatccgtacaccacataatatacagaaaaactaattacaaataattcttatggaaatgacagtaataaactctcattttccaacaaaaacaataaatagttctggattcattcaggatcttatgtatttttgatggtaataactattctattctataacaaagtttgttataatatgatgtggtcaaagttttgcattattcggggaagcgctagaaatatcagacggataatctattaataatcgagacaataattgatacaatcggtaatgcaattattaatacggtcttatatattaacggctatatcgggcttatgtaattatactatttgcttattgtattctgtgttcgatgttcgatggttgtttgttggttgttggttgttccttttatatataatatatttaaattatgtgtaagagaggagtaacagaagatagttccatctacagaaaacgttctccttttatatattttctggaactcgatcacctattcaacttgatatattacagaattagtaattcatatctttgttattagttacaataatataatcgaaaatcatagaacatttaggacaataggttatggtggcgtagtagaaactataatgaacacggtgtacataaacataatatgttatggtgccgcggtaacaacaatatctgaacacgccgaacactaggtggcaaatggacacgttgtacttaaaacataatagatcactttagattcagatagaatcttatgtaatcttggtggtgttatctctttattatacgataaggttttaaacattgagctcgtatggcgcagtggtagcgcagcagattgcaaatctgttggtccttagttcgaatctgagtgcgagcttattttttgtcgttttatgatattccggtgggtgtgattatttttgccagctgatttagatgtaatgtaataaaggaaaacctgattatgagagatatactcttctagatgctaatatagacagatatagcttgaattgttgtctgtatatgacatataaactatactctacataaagagtaaactaatatacatagatatacagataaacatagttatataaacaagaaaaacaagagcgctgtcgtcgaccaaggagtccacaagatcatttatagtgacattcggatttcatatgttacatgtaatatgatgggtggaaacctattatgagagatatactgttctaaacacaaaaatagataaatattttttagttagttgtctataatctaatagataaactatatgttatacaaagaatcgcctgcataatgagatatatagaaatatataaagtttatgaatataaaaaataagaacctttttgtcgactaaagaatttgcaagagcaactatagtggcatcaacataatctattttacactatatttagggtatatttggattaatttaaaagaatataatgtactcaaagaaataaagatttttttaaatgtagataataaatagtatattaaaatagacaaagataaaaagtattgaaaataatgaataagcataagtatctttggaatcattatattttattgttgtttccttcattattcagtgacgataagtattgttatcaaatattcagaattaaaatgatatattcaggtttatgactctttgtaagttcttatttatatttatataatttgttggcgataccaagaaatatttttcctcaaattcaaacaatgataaataaaagatatgatttatcatgcaaatttgtgccataagtagtattttcatattttgcaataataaaattattaatctttttttgaaatgttttcattatttgttgtaatgttttgtattaaactgtaaaactaattttaattaaacaattttagtggtacttaccatagaattagaatgggggatttttggatcatacatcagaaattattgacatattcagaaaatttaattattaaaatactatatattatttgtaaaatgttctctttttatttgatatattattaataatggatattcttaagttaatagaaaataatattttatagttattctttaatataataattatttatatgaaatttagaatataatcaaattttaatcaatagtttttcttggtatatttttgtttagcatttaagttacattagttataaaaacaaaaggtcaacattgtgatttttacattgaattaattgtttttttatcatgctttttttattaggtttttttaattttatataaacagttattaagtattaatacacaatactagattaatgttgttaaagtttacacaattacttattggtttatctttatattttatatatatattaatcacaatttttatttttaaagcatatcgataaagaaattgtttattttgcagttggctttcacagcgaagtaataatttactatttgttcacaaactatatctttggaaaaaggcaggtagattttgtactaaactatagcgaactaaatatttatcttttaaatataacaaaagattaaacgaacccctttgaatacttttttaccattcgtataacaaacttatctgttattcacatttttaaaaccaaaaatttcctcatatcatatttttattttatatatactcttttgtatataattattaatgttgcactatgtacaaaaaaggagattgtaaaaatcttatttaattttgtctattactcactacataaaaattagagaatatatttaaaaatatgttcaatttttttaatatattccaaaattaactctcgaagttcacacatcttttaataaaaacttaacaaaaaaaagttctctttactataataacttgttagcgtaagatccttgttagaatgacaaatttatttaaaattttatgatattaatattattttgtatgattaaatcacttttacaataaaaaaaatttatcattgaatgtagatagaattcctagtaaataaaatacgtacttatacttcctctcttcaattattataacttatttgacatgtctttttaatatatcgaaataagtggataagtttgaaactaatggaaaaaatactaatatacttaaaaacaagaaaaacatatttattaaacttatatcaatcccgtaatgtatttgctataaacagaaaaaagtgtcgatctaggaacctctcccattaatttttgatttaacatatctcatcaaacccttcatctgcaatttatagttgaaatatttatgctaacaaaataccaactgctggaaatgatatattaccgatttgggtaacatgtaaatatatcaaagaggaaaaatgtttgttttgcacattcaatattacagagataagatcaaacaaaatgaaaataaattaatatattatgaagatttgccaacaggtagacatatataagtagacgattttacttattaattttccaatctggatgaataagttatatacattttatcatatgtttctttttgtatttgtataattattaattcccaatcaagagatggacggaaaattactctacatatcaacataataataatacataataataacatacaatatgatcaccgatgctaaaaaatgtatactaatattattcatccagaggaccaacagatacagagaaattaaccacttattgaaactatttgattttataacagtcatattatttctactaaatagctgttttatttacattaaatgcagtttaaaaagccatcaacttcaattcaaaaaaaaaatcaatattcttatcagataaaattttaattagtaatctcgatttgaaaatgatagcttatttatattttgtcatttgaaatagtaaatatgtgtattttgttagaattgaataattattgctgttagagaatgtcaaattaatcaggaaaaaaatactcctacctcctatatacatatatatctgcccgaaaaaatatcttaaaaagaatcttactctttatggaaaaaacaataaaagtttcaaagattcccttctcttaggttaaatcctgaatgattgacgaatgtggatcaaataaataagcagactctcttgccaacaaaaaagaaatatttaaaaaacaagcaaattctctcataataatctgccccatcttatatttatcttatcttatcttatcttatctctttgctctataaattttttctcctatcattttttcagttgtgttaacttcctatcgggaaaaaatgcaatgtagaaatgttgcgacaaaatttaaggataagcaaatttgttcaatttctaatgaagatcagagcagctgaaaaacaagaaaggatttgtaaaactcttcttctttatacgaaagactcttccttgtaagtgactatgaactgaagataaagaagcgaatgttgatggtgatataacgtttatctattccattgtttgttcaaattattttatatagtatcaacatatacgttaccagtaatcattttctgttgttaatcttcaacacatatcaatcatatcaagttagaaatttaaatataaaaaatctaaacacatacacatatgtatttaatgaaaaaatgataaggatagagatgtgaaaataacaaaagttttataaccgattatatgtggaatcatagtgaccttacatcaaattaaatttggtccttttaaagaagtaaaaccaaacctttatattgatacattgcaacacaaaaaaagctcacttataatctcctaataactacaacaataacaattaatcaatcgattaaagtatgacaaatggcagcagtgatttcacacaaggctggtacattaatgaatagaaagactttcgcaaagcttcaaatctagaagtgtcctttaaaactttgcttgctcttattgaatctcaggatattagttctgtaaatcctgcttaaatctcagttatttcgaaggaaaatttagaagaacagtggattgctctccaaactagaggaaataagtataatttaccattatatggtgttcctgttgcagtcaaagacaacattggtgcaagaggatttaaaacaactgcaacttgtcctttgtttgcatacgaacctgaaaaagattcaaaagttgtacaattattaagaaatgctggtgctatcattatctgaaagactaatcttgattaatttgctactggtctagtaggtaccaaatctccgtacagcaagactgcacgtgcttttagtgatagacatgtatcaggcggttcctctaccggttctgccagagtcgttgctgatgggattgtacccattgctctaggtaccgacacggctggttctggacgtgttcctgccgccttaaataatttaatcggtttaaaacctactcgtggtgtttttttatgtcaaggtgttgttcctacctgtaaatctttagactgtatatccatatttgctttgaatttatcaggtgcagaaacctgtttcaaaattttatgtcaacctgatcttcacaacaatgaatattcaaggatatacccctctaatccattacaaaaatatagcaaagatttgacaattgtaattccaaaggtattaccatggtagaacgagaccgaaaatcccaaattataccatagtgccgttgattccttgaaacaaatgggtgctaatatcgtcaaaattgattttgaacttttattaaatctagctcattgtctatatgaaggtgcatggatagctgaatgatatgctgcaacaaaagaatttttagcttcaaaacccgcccatgcatacattagatcccactgtattaacgattattaaaacagctacaaactttgatgtatttgatgctttcaaatttgagtacaaaaggcaaggaatcttacagaagattaaccaatggttatcatcaattggtgtcctatgtgtccctacctgtcctttaaatcccacctttgatgaagttgaagcggaaccaatattagttaattctaaacaaggtacttggaccaattttatcaatttagtagacatggctgcattagctattccctgtggtttccgatctgacggccttccagacggtatcacattgattggcaaaaagtttactgactatgctttactcaagttagcacacagatattttggaaggagcttttcatctggttcgaggtcatttggtatttttaaggataaacaagtttctaaatatgacaatgtcactggccctgaaatcaatcctaattcttccatcaagttagccgtgattggtactcatttacagggtcttcctttgcactgacaattagaaaaagtcaatgcagcgtatatagctaaagctaaaacttcaaaatcgtacagactccatgccttaccaaaagatggacctatttcgaaaccaggtttaagtcgtgttaatagcacagaaggatctaatatcaacgttgaaatatacagtattccaattgaaaattttggtgaatttatatctatggttccacaaccattgggaattggctctattgaattagaatctggtgaatgggtcaaaccgtttatttgtgaagaatatagttatactgtcaaaggttccatagatataaccaattttggtggttttagagtatattatgattttattatgagagaaaaaggaaaaaccatttaacactatactagttgctaatagaggtgagatagctgccagaatcattaggacattaaaaagattaaagatcaaaagtgtatcagtctattctgatcctgacaagtatcctcaaaatgttattgaatcaaatattgctgttccgttatacggttctactccaagtgaaacatatcttgatataaacaagattatcaaggctgccaaaaaaacaaatgcagatgcaatcgttcctggttatggatttttatctgaaaatgctgatttttcagatagatgtacgaaggaaggtattgtgtttattggccctatcggtgaaacaatcagaaagctaggtttaaaacattctgcaagaaaaatagctgctgatgctaatgttcctttaattccaggttctcctttgataactgacgcaactgaaactaaaattacttcaagcaaaattggatatccaataatgattaagtcaacagctgggagtggtggtattggtttaagaaaggttgataataaaagtgaaattgaagaaatatttcacattattcaacatcaaaggaaatcgtattttgaaaatgcaggtgtttttatagaaaaattcattgaaaactccaggcatgttgaagttcaaattatgggtgatgggctaggtgttactattgcattgggtgagcatgattgttcccttcaacgtcattatcaaaagattatctaagaaactccaaccccaaatgttggtgagagcacaagacaggctataagaactgcagctgaaaatttagcttcccatctaaaatacaaaagtgccggtaccgtggaatttatctataatgaaagagctgacaacttttactttcttgaagtaaatgcgaaacttcaagttgagtattcaattactgaaatagttacaagtttagatttggttgaattaatgattttaattgctgcgaacaaatgtgttcattttagaaatatcaaaaggaatattactggtgtttcaatggaagcgagattatatactgagaaccctttaaaagattttagaccatttcctggttaattaacatatgttgaattccctaaatggacaagggttgatacatggatcgaaaaaggtactgttatatctgcagaatatgatccaaccttagccaaaatcattgttcatgggaaaaatagagatgatgccttgagtaaattactacttgctctccaagaaacaaaagtttatggctatattacaaatattgaatacttaaaatcgattgtttcttctcaaatgtttagaggtactaagatatccacgaacattcttaatccatataccaataattcaactgctttagagattattacccaggttattcatacatcaattcaagactatccggaaagatatgggtattggagaatcggcgttcctccttctggcccaatggattcttattcctttagattgactaatcgaattgttggcaatgaggattcggcagctactattgaaattacattaattggtcccattatcaggttccactttaatacaattattagtattaccgacggttctgttaagtgtaccataaatggacacaccccaataaaacaatttgaaccaattcaagttcatcataacgacaccttgagtttcggaaaattaacctcagactgtagagcatacttggctattaggggtgattttgatattcccaattatcttgggtctaaatctacatttacattaggtcagtttggtggtttcaatggcagaattcttaaagcttcagatattatttttataaaagaatcaacattcactgttaatccaatttccattccaaatccaattatcccacaaattccaggtcatggactgtagttaattggtacaatgtgtgatcctcatggatctcccgatatttttactgaagagagtattgatgcattttttaatgaggaatggaaggctcattataattcaaacaagtttggtgtcagactcactggacctaaaccaaaatgcgcaagaagtaatggtgacaaaggtggtctacatccttcaaacacacatgattatgtctattctgtcggtgcaattaatttcacaggtgatgaatctgtcataattacttgtgatggaccatctttaggtggttttgtttgccaggctgttatacctgaggctgaattatgaaagattggccaagttaaactaggcaacttaatcaaattcgttccaattagttataatggcgctagaattttaaaagaattccaggataatatgatcaataccttaaaaattaaaccctcagtcaaaactctttctgatctaatggttccatcatataacaatcccattctcgctgaagtaaatcataaaaatgaatacagtccaaagataacatagagacaggttggtgatcactatattcttattgagtatggtgataatgttacggatttcaatctaagttatagagtacattgcttaattaatttggtgaaaaaaaatatgacggttggaattgtagaaatgtcacaaggtgttagatcagttctaattgaattcgatggttataaaatttctcaagcaactcttgtgaagacattattattttatgaaaatgaaatatgctttgattccaactgggtggttccctctaaggtatttaaacttccaatagcctttgaagaaaataaaactttagcttgtgttaccagatatcaagggactatacgttcttctgcaccttggttgtctagtaatgttgactttattacaaatgtcaataacatatctcgccaaaatatatataacatgatgtattctgccagatttttagccttaggtttaggtgatgtctttttaggatcactatgtgctgttcctttagatccaagacaaaggcttcttggaagcaaatataatccatcaagaacatatacagagagaggtgctattggtttagagggcatgtatatgtgcatttatgcgacatcaagtcctggaggatatcagttggaaggtagaaccattccaatttgggacaaattatctctatccaactttaacaagaaatatccctggatgttgacaccatttgatcaaatacaattttatcctgttttggaaaacgaattagaaacactaactgaggaaacagaagctggtatatttgttgtcgatgttgatgaggggacctttgatcatggattgtaccaacaatggttaaaagaaaatgaaggatctattaatgcattctatgaaaaacaagcgggggaaagaaaggataattttatcaaattagttcaaaatttaaataaagatttatcaactcaacaaaattcttggcaccaacctgactcagatgaatatcctgagaatgttactttaatctattctgaatattttggtagattttagaaatccatggtatcaatagatgatattgtcagcgaaggacaaggcttacttattattgaggctatgaaaactgagatacttgtaaccacaaatgttgcaggaaaagtattgaagttattccacaaaaatggtgacattgttgattcaggtgatataatagctgcaattgaatgtttaagttaataaaaaaagcaattacatgtatatccacatactcatattttggtactttaaactcatatcaattttctcttttattaaaaatccaatagagccactagttatttatcactctatactgatttatcattataaaatatatatacaacattataaatattaaatacttcctaagtctaaacatgattcttaatctgaaaaaaaaacgaaatggaacaccattaagaaatttaaataaaccaaactctaaagctgaattatttcagatttattgtttataaaatttttttgaagtttaatgagtaattaaaggtgttgtactatccttagatcttgcatttcttacactcagatacaacctattctcttcatttctttgcttcatctttattgaagtgtctgcaatttttattcttttaacaattcttttcttttgccatgaaataggtaaaaatgaaatataaccacatttttcctcaattattaaaatattaatggcaagaattagaattaaccaataaatgatgtaactgatgatagagccataagtagcactattagtccaaccaaaaatagctgtcaaaagcatccagaatccatctctttcaccgttgcaacaattaacatgccatacagacctagagatgtcataggatccaggaccattaccaacttctgacatatcttgtccattacatttattgacgtagtcttgcagttcaaattgccaaactcctttagaaaataaaccagctgcaattagatacataaaacatgtagtgattgaaagacatatctttaaagataacgaacttgagtatttaaagaaaaaataaccgaagattaaactgatggatactgcagctaacatagataatggaatggaagtcaatggttgatcgatcccaacaccaccaacaaagacaacagcttctaacccttctctcaaactagtcacaaacggtaagacaaaaaatgcatatctactgctaaaagtcaatgccttattatcattatcattaccatttcccttcaaaatatggccttgttctgaatagattatgctgactaatttaactctaaatttttcccttaatttacccattcttagaaagaataaacccatcacagacataataatggatgcaacaatgcttagtgccccttcgtagtaatgttcacttagtgaccacaaatctgaaccgatatgataaaataccacaataaacgtactaccaattacaagacacaatattaaacctaagataccaccactccatatttgaaattttaatctgttatattttttcaatctttcttgattatctgtctctgttctttcttcttctctaaattcacctgaaaaatcatacatttcctcttcttcttccacagtaagaccacgtccaagggaagaaactgataagagggatgtcccatatggatctgctatatttctaccagtgtcaagagtacctgcaattgcaatatcagatgttgttgctgcagttgcagccgtagtggtagtagaaacttccgtaaaaattaaattttcttcttcatctttgatacctagtgccttacggacaatagttattagaatagatagaataacaataatttccaaggattctcttaaaaagataaaaaaaatttggaatgaaaaataatcttcaaacatcacacttaacctctttctgaatacaatgtatactgacaaatagccacgggtgtatccttacgtagattcaaataaaactttgtatacctaaaatatatttatgctttctttctttctcatctatagtatatcctttagattgaccaaagaataatgagggtgtgaaagagaagaggaagatagagaagcaaaaaaggaagcaggacagatggccttgttttataaaacactagcaaccttgtttccacctccctcttcatctatctgaatcaaaataaacccacaccagaattcacaattccgctaaacaaacccgctaaacccatacatctgcacattgcttcatatttcaagcatcacaaattaaagaaccacaatttaaatataacaagtattgctaatatttgaataaaaataatagtgtccttgcctttggaatatcaccactcaacgagttttatttattagttgttgtttcttttataaattaaacagataggaataaatgagcatgaagacataaagaaacaattttaataattgaacccaaatgggttcattggttgattttattgctaatgtacatacaaaatagttttctttttatccttttccttcttttaaatgaaaaatttttatcatcgatatatatattttatgttataattttactgtcgcactgcctccttccctttttttttttcctgttaaacattctcctttctttttattattattattattattattatattcatttattttgatcgattcctgctggcatctttaaaccttgtgcttggaaaaattgccttgtacaaaagtaataatctaaccatgtttgatctttatgtggttcacatatgcatctattctgtaacctaatgggctcctcaattggacaagaatggaaatctggatggtagaatcctagcccatcaaagaaatgaagctcagatttatctaagaacaaggatgcagcaatagaatgtacaggtgcatcaccccatctctcatagaaaaatccaccactcttatctaaataatcaaagtattctctatatgcttgagacctatagaagtctagtgatgcaatctcaaaattagtccaaaaatgacacatattgtaagtcttaccattatcatttgacacaaacttcattaaattattcttattaacatgctgtgggttcttctcaataaaatcgttgattgtcgcccaaagagttggaatagtagcctcatattcactgacagataagataaacccatatttcttcttatttaccttcataaatttgaatatatcgtattggaagtcacagtacaacttaatatctgtatcaactctccaataatattcatactcatccaatagtggactttggaataagaacccagattgataacggcacatgtgtctatatggaacagacccaccataaggaacattctttttactcatatcttttctggccttatcaaatttaacttcatcgataaaagatgggactgaccaatgttcctttggaatcaatccgtatttggctttacctgacactaatgcagatgtcactcttttgaattcgtcagtaaatggttgatcattcaaaaacacccaatcgtagtgatatctattattaaatcgatcttcaacatgtctgatagagttaactaaactccaaagatcagaatttctcgctaatgtaaccattgcggcttttacaatctcaccatcatccattgggtgaaccactttttgtgagatatcagtaaatggcatcaaatattctttatttaaatcgtatctactgattgtcgtcattgggataaaagactttgacctgcttctgttatttgtaatagatgaagaggaagaagaagtagaggattgcaataaaaatagaatagttaataccattatgaaaccagcaaatcctaaccttatacttttctgatactttttgaccagcaatgccgatttaggcattaatcttttcttaccttctgctcccatatttttacgtggttatatatatgtatgtacacactacgggaaaaaagtaggagaaaatgaatacatctttatctttgccatagcaataagaacactaaggcaacaggtactacataactctattctatcaataagtacatatactcaaatagataaaggttgttaatgcacttcctgacaactaggtggacacttgcagcaaaaacaataaaactattctaattgatctttatttgaaatgcctgaaaaatttgtctcaagacaaaacagcttctcgaagaaaaaaaatcaaaagataaattaatagaaaaaccaacaaagaaaaaaaagtaataatataccaaaaccctaataaagcaacaaatatttttaaaaaaaatagtattaaatcgtagtataacctaattaagattggggctcaaagactggaaacacaaaaaaaatgaaacaagaaaaaaaatataacgtaatcaaacagaatgacaattaaaacaatagaaacacaacacaacacaaaaagttcacactcgaggattgaatacatttcaatatttatcacttgaattttatatagctttctataacacaccattggcagcaaaatgtcttgaatatatatatatatatatatacatttgaattttattatcgaacagttaaaaaaacgaattgtatcgcataagaagaggaaataaaatgaccttcaatattgatgaagatgatgctattaaaaaagctactgatttgaaaggggaaccaatatcaaaatgttctttaaatgatatcgttcataagtttgaaatgatcccaaataataaactagctggtactctactaaacacagacaatgcagatcattttaaattgaactttataaatcaacatcaggaattcgtatatttaaatacttcaaagaaagtacgtatatgccataatttatcgaaaatttcaccaacaactgaaaaaaatgttatctacatttatttacacggtcttggcggctccttagatcaatttttaccacttctgaaattaacagaactgtatcatataccgtttttagctattgatttgtttgggtttggccaaagtgacgaattagatcaatataacatgatctatatagtggaaaaattacatgatatattaatcaaaatcttgactcgtttccaaatagatagtaaacttattaatttatctttaattggacactcagcaggatgctacctttcactacattttttaaccaaatatatcagtcaatggtccataaccaatgtcattctactggccccaccttctccaaatgtaaaacatttagataagacaaagatcttaacacaggcatttctaaaattcttatataatgtaccttcactttttactttttatagagaatggtttgatcaaagtaaaggtttacatagttcaggaattaacaaatttttccatcagcttgattcaaaagaggaagaggaccatagagaagatagtaatgataatctatcatcaagatatttaagattgtttcaattctataataatattcaaataaaaagtagaaccctcattgggtatttgttaggttgggaaccattggattggaaacaaataaatgaaattattaaaaagtttaatattaaaattactattttctgtggagaacttgacactatcactgatgcaaatgaatgtgctgtcaagacgaaggaatcatttattactctgtcgaataaacaacaagtagaattaaataccatacctaattgttctcataatattgcctttgatgctccaaaacaaatctgcaaattatttgcagataaattcttttgaataaataaataattagatatataattaataaatcaattcattattaattattcaatcattattcaatcataaatttatttggcataaaatcatatatacgttaacacatatataaaaacatgtataaaataataaagaaatgcataagaaaaacaatgtataaataatgtgatttaatgctataatgtatgcaaagaagtataccaccgggcatataaggcatagaatatattctttttatgtgacataataaaggtagagtaaaaatgtatatttgatttttttggggtatcagtaagtataacgaagaaaaatgcacagatctatctgtaaacaattattcaaataatattgatcgtattagaaatataattgttctctccaacatgtcttcttaaatcattgttccttaaatatttgattctagccaccagtccatggattagacgatctattctctttggagtctctttaggtaaaattcctaaatctgtagaagagaccataaaattataattttcattaatacacaaattaataattaatgaaatatagtcattagatactttttttaaaatatacgatgtttgacgtttattctttaatataacgatcctaaaattgattatgttttgattctcttcatctaaaccaaatttgattgggaaaatatttgaaatttccataacatctgaatcagttataaaattatcattttgatataacctttcagatttaatgttaaatagatcttcaattgtcaaatcatcattcttcaataattcatctaaaactagcaaaacaacaaaatcagacaatgtacccttacatgaccaaggaaaatttctattcataccagcttttaagaaacttaaatctataatcttattattattattcatgttaattgaataggctcttgaagtagtatgaatatcgtagtcaataattctttgaaatataatcaaaataaaatacttaatcatatattgcctgcaccaaacagccccatccattttgattgtggttacttgcattaattttgtacatagaatttcaaaaatttcaacaggattcaatttatataattcaacatcatcgcctgaatttttattactgttccgtctactcttttctatgacacgtgcttttgtttgggagtcaataggcattggatgctctgatctattactaataagtctggaacaccagtgatcggagtttgatcctgttgtatcattattggatacactactcacactgttacaactaatgatagacagaggtctgctcaatcctgaatcagtcacattgttggtcaagataacaccttgcccaattctactatttcttcgggatttgctatttccagtactgacaataatattcttattatgctcataatttttagatgaatctgttgcatatatcacttccaatctattttcttcggagtttgtcataattgtactttcttctacactcggtaaaatcaaagatgtcaatcttttatgatgttttgatttgtttacaattttaaaatcatcacaaatcgtcaagtgagataaatctaattctactagattaggacagtgattcaatatatgtaaaatatagcctaagggtaaatccttacacgatgcatattttaaaagaaatttatttgtatatggatggttagtcttaaaaggctgctcaatggcaaaacgaatctgagatgatgttccagtaatatctgagttatttgtacaatcaactttattaacttccgtagtttgaacacttttagaaatagtagtgttacttgaacctttgttgttacataaataattttgttgttttgaggaattgatagtggaatattttgtcaagtttcttgctcttctcttattctttgacataactttaaatctgaaccatttattatttacgtcttgagatgtgattgtattaactttttgagtaatattcatattattatttaaactatttccttctcccttattgtagtcaccagttgtattatttagcaaaggggatgaagttaatgaaagatgggatgcattttgaaatgtagacataatactacttgtaattgaactaactgaactgtttgatctagctcggttagcagtattttgtgaggtatcaatgtgactgccagatggctcatttctagtagatgctgaagtgttcattgaaataacagatccattagataatgaggtaaacaaagaagaattggaatgaatagaagaagaacgagatacaatccttttcacagtataactatttaatacaggactactatacaatggatcatttctatatctccaatctctccaaccggcatatgcaatatcactaaaaggttcagaattattcgtgttattgatactgttattattattattattatttctaccagcttcatttagtgcagttccattattatccccttctacattgttttgatcatcattaccatcaccactctcattgtttgagtcattaatgttgcctaccacctcctcttcgtcttcattatcatcttctttgaatattaaaccgttttgcaagtctgatagttttaaaactttaacaaaatatccattttctgggtgtaacctcaaagaggtgacaaactgagcaacacgatatgtagacacaaatctgggttgtttatacaaaacgatcttagtagccttataccaacgtttggatacatagagacaacaaaccagagctttatagtgtttatcataatcaatatacgatataattctagacaatatttctaatggtaggtcgtctattgtggcgaatgactcactgaacgtggaatataagtagatatcattattattcagattaaaaatttctttttccttatgtgattttgaggaaaaaatggagaaagtatctgaagatccatgatcgtatattttgttgattaacttcttcgaccctgatgatatcaaagatttatattttcttttaatccttgattttgtggacccaatagtcaataaagattcgttgtctgccacaattcgattgttagcagcaatatgagacgttgaagcattatttctattataagaaggaattaaataagaacctgtctttgtagaaccattttttttggatgactgagtatcatacagtttttgataaatggaagttccataccttgagtaattattactaactatgttgatattttgaacttcggatctagccataagtagttatatacaagaataacgaaagagaaaaaaggaataacaaaaagttgaatgcaaagataaaaggataaatagtatggttttttttcttgtttatgaataaagcagtacaaagtagcaataatatagcgttaggccaaaagaagcaattttcaaagatatatttgtttatgtattttatgtgtgtttgcaattatttttgtgtgtagtgctaaattgttttttcctttatccgtttcaaaactgttgcataactaatagcaagataaaaacacccattttttcttcttttatgcaagtatctcttctatgttgtaaaagtttgacctcttcaaaagtcgcctacctgttgttcctttttatacaattgtcgatggctctattttccccacatgaaatttcacgaaagcagaaaaccaccacaggcggaggttagaaacagatctatgttcgcagaaaatgaggggtaagaaaagcagaaaaaaagaaaataaaaatagaaatagaaaaaaaaaggggaaaattgaaaaaaaaaaacaaaacaaacaaaaaactcaagggatcaaaaactcagaaaccttatttatttcttctttgagtccatttaccctcaccttattttttgtatccttgaaaacctcaatggtagatcttcaaaatttcacgtgacattaatatcacatacatatacatacatacacatatatatatatattaatcgatacattcttcaatataatccaatgtaaatacattaatatcataagataacaagaaaacatccatttattggcatttatttcaattaaaaaaatactgccatcttcatttttccttccttccttcattctttttttctttattttttttttgttgcattttttgatattgtgtagtttaaattaatgatatatgggaacttctaaacaaatgaagtaaactaaaataataaaattactacaattattattaatattattacatttcgatgtttgattttaattatacatctatacttgatacctactattcatatggatttctttatttaggattcaccttcttcatctactatcattttatcatttgtatcttcatgctcctcatcttctagctgatgtgatatttcatcatcaacaaatttcaattctgaaccttcattgatcaaatgccaaacatttaaatatgaatattcttgtatacagttacttaactgtaacatggtaaaaccacgggatctaaccgccttcactatactatcataaggtattgtatttccatgaatcctatcttgcgacatctttttaataattgtaaatattttagtcgttggattctcttcttcacgtcttctgttattgtcctgatataatgattccttagatactttaattaatcttaatgcttcttcaacatcttcaatctccactgtatccattaatcttaatttagctaatgcttgtgctaatctaattataccaagtaaagttcttggcgtagcttgtccaaaggaaaatttagaatccatttcacgtttagaatcttgtcttaatcttatatatgcttgaatcacatattcattgacttcaggactcatcaccggtcttttactctttgccacagcaatgtattctctcatacgggcaggctcaattggttcaaaatcaaggtctggctgtttattatacatatgaacatatgcaacatgctctgctaaaagtgagtctgattccatatttggtgtatccaacattaaaaataagacatcaaatcttgataacaaagcagctggtaagttaatattttctaatggtgatagccttggattgtatctaccatacacaggattggcagccgctaaaatagaagttcttgcattcaatgttgtattgatccctgctttggagatagaaatggtttgttgttccataacttcgtggattgcagttctatcattctcatccatcttatcaaattcatcaatacaacagataccattatctgcgagtacaagggcaccaccttctaaaatcatctcatccgtaactggatctttcataactgcggctgttaaacccacaccggaggaacctttacctgtagtgtagacaccacgtggtgtaatcttacagattgctttcaacagttgtgatttagcaacaccagggtcccccattaaacaaatattaatatcacctctaattttcatcccatcaccaacttttttatctacaccacctaccaacagtaataataatgcctttttcacatctagattaccaaaaatttctggtgcaatggatttagccattctattatacacatctccctgtgacactaagtcaaggacacgttgctccatatcactagtcatttgaaatgaagtaaattttttcttatgttgacgaacatattgtgattccaaataagtctcagttaacagccctgctttcaaagctttaaacccagtatatggcgaaggtaaatagataccactgacatcaacaatatcaccaggtgtcaacgatctgactaaaggaccattaacatgaacagttaaagaacgtgggatatgacctacagggacttgttgtgacaattcttgaatcttacattcttggaatgcactgaatttagaagctcttgtactcataaataattggcccttagtttgattttgggaacattctttagaagtacattccgttaatggtgtgaaagtacgtgtattaacttcttggaacacttcataaccacattggtcacatgtataagcaatcacagtgactgctggtttgacatcagagactctagtcacaatacctctgacagtaatcaatttacctaaatagtcacctttgacttgtctaactgataaaggtctcatcatttggatttttttaccagaaaatttataacgatacataccacgagaagacaaaggtttgaaatacacagaataacgtctagtcaagatgggtgggaacagttcagcttcatcttctgccaattctcttaaagtgtcagaattttgggaattatcgataagattctcctgtccaatctcattgaccctatctgagatcaatctttgattcctcagtcttctttggttcaagataacatcgagaacatcatctttataatcaatctcctttgttggcagaggtttaacctcatctatggccctagagaacaattcaatgaaatgttttgtattctcctgaattaaccctactaaatcaataggtgtcctagaaccatcgaggaatttttctttctggtactgtaatatgtcatctaactcaataaatatttcatcagtctctctattagcgactctttgtagaatatacatatatttaggtcccttcccgatgtccggacccccaaccttgtcttcctggaccatgtttacatcattctcattatctatatttccatctgtagtcaaatattgattttcatcagttacatcagtcttaaaatgttgtaagaaatctctgatatcttgtgatatagttgtatagtccacatttagttggattgaaggtaaaacagtagccatgatgaaagggatacttatataacgttttggttcaatcttctcttgatatactagacactatacaagtatatattgaggtgttacttctttcttcttattatttaaattgctcgatcatatatgatgtatattagatcgattctatataagatccttgcttttaacttttaataaattttttttcaactgtttgttttgttttgatttttttgctttttttttttttttttttgcactttccatatattggggacagaaactaattatccaaagaggaaatctgattacagatcactcaatacgaaacagaaagaagccaaaatggacgaagccattttgtagtttaaactatcaaagctgtttttatttatttattttcaaatcaagtaacttttagagttagattgttgtggttgttactgtgtgtaatgattatccactagttataatctcattactgcttaacatcatacagtgtactggctatatcatgtcaaaacattaagatctgtctgtatttcacaaagaaaaaagaaaaaaatcaaaagaaaagaaaggaaagaaaagcaggactgtatgacctgatcaaatatcagagcattccatatacagcacaagaaagagtaaaataataaaaaaagaaaacaaaaaactaatacaggaaagcctctttttgttcttcgaagtatacatcaccagtccaatacagttgtattctctctacagatatataaacagaaataagaatattaatggtgcataatacaaatgaggacaatatcaatgaaacacaatacgacaaaagaaacgatcttgatataaatgaagtaacaaccttcaaggttaccatagccgctatggaattttctcctccccttttctcttttctttttcttttttcctttttccttttttttttttttttttttttgtttggcatatattgttttctcgaatcagttgtcatggcaacagagttgttttggtttgcctgattgagacttgtttcctattaccactaatacctcagtacaacacagtaatatgtaggtagatattcattatatacatacatacatacacatatacatatacatatatatatatgtatatgtatatatgttatcgaatggcaagaatgaaagaaagaagattcctcttatttttttttctttttattattgttatagacccaatctttctgtcaagtctttggtgctatactataacagataaacattcatatacatagacattcacacacacacatatatatataacgaaatagaaagatatgaaaaaaaaatttactttatatttaccatccctttcatattttatttttcaaaataaattattcaaatggaataaattattttattcaagttatttaacactttgttttactctacctttttgcctacctgcttactcttcttttaaacaaaaaccagatataatacctcctatcattaacatggcatctcatgttcgttcctattaacataaccataaccataaccataaccatatccatatatacagacatatacaaatatatatatatatatgtatgtgttattaatgaataacaaatataattatattatttatttgatagcttaatcttcgactgatccatttccttgtctccattctatccagtaatcatacggtgtcttacacatatcaaacccatataacttcaacaacacattatcacagtaatataacatatgacccgccataaaacttaaggacacttcaactaagcttctatgcgccacaaaatacattaccaaagccatatttaatggtaacaacgcaaatataagctggttcccaccaagcaatggaacatttatgccatcgtttcctgtcttgtatagataatacactaaattttgatgcagtaggactcccaatgaagttgagggttgtaccattgaggtcattatgagaagaaatgttagaatcaatgtagtcatccatagaaaccttcgtttgctgcccagaatgttttctagtgtgctcaaatgattcgctgatatgaatatatctactatcgtagaccaactaaactcacctaggtcgaaaagtgaatatatgacccgtaaatattgcctcttatggaatactaattcataattataaaaaatgtctgttctactgattgctcccgtcgacgtcaatatggatactccaatacatccaattatccatgctctagttattacaggaacatcaagaaataaattgaaaacaatagcctccataattaccagttataacaatataaaattgtattaaatggaaaacttctatttatttatctttctttctttctttccttagttatttttccttccttcccttcttctctaattgctacttatctatatcaaagtagttatatttatgtatgcttaaaatggctcagccttgggcaaacttcattgctaagtatcgttatcatttattcttaataactcaaattctttattaatcatttttgtccagataattctatttttttttttccttattttttctcttttttgtttttttcttttctgtctggtcgtgtctgtgtatttctcatatattgctgtattacttacaaaatgaagtttagcaaaagcaacgaagaatcaacaaggatgaaagacttctatagaaggtaatatttgtatttttctattgaagtcctttcttcatctctctctctctctctctctgtatgtgtatggtgagaggcaaaaggtttaaatatattttattttttttcaaaaaatgtctttatgtgtgaataactatatatatatgtatatatattatatttatacagtgttacaatcattctctatatttattttagatcatgaactgatattttcagtttagaataaatgatatgtgatacttgatcatctgatgtaatttcttctgaatcaccttctggtaatcggatttgtagtctaaagttttcgctatcgatccttggagcaattttattacaaagttcatggtacgttatgtttgggcttaacatcaacgcaaaaatatcattcttataatagaatttgatttttactggctttaagggtggtggtgcaacacttggaggtctggatctagaatttgatgatgatatggacaatttcgaaaccttttctgtgatctttaaatcttctccagttaatgtgctgttctcattatttacattatttacggaatcatttttaacacaattggtattatttacagccgtttcaagtacttctgttttctcagttggactatataagccattgttatctataatctcttctctatcatatccgttatttctgatattaaacaaatgacgaactgcaatatagtcacatatataggctggcaacttgattagctctttcacatatatatttagatcctctttacgtttacttgttatactatctgtgacatatgggactggtcctggaatatacggtattattctcttggtccagttcccacttgaatctctcaacttaccactctcagatgggaagttatctaataattggacttgtaagtcatagaaatcttgataataacgtttcaaatatctaattttcccagatgataattgacattctaatgaaaaccaatatttattgtcttcaaatttaaataaatttattgctgcatcgataataacattatgaacatttccaatatcgactgatttttgtgaagacgtgtagtcattataatatgactccttgtcatccttctgtggtttcgattcactattttgattatgatcgacttgacctaaggcaatgttgctggctttatacttggccacgtttcttttccattcctgaatagttggcagattaacagaatctatatcttcttttacatcattaccagtagcgtatcctgtctttatatcaataatactgacaaatccgacaggtactaaacctggcccacctaatctgcctattggcttagcaataaaccactcataattatggtgtgcacatataaataaattttcaccaacatatgaggtcagttcatctggtttttctgctttaaaatcataaagaactattgcatacaacgaacccattttctgtgattcagtttcattggaactcctctttgatgaagtagactttgttgtaatattaccagacatttcagtagacattctgtcggttgaagagtaaggtcttttatcaaatacttcaaaatattctctgggtacaaggccttgtgtcccagtggaagggttaacggcttcaaaccactgatcattctcatcgataacatagaaaaagtcaccttcattaaaggatattccagtagctgtatgtgctttaaaagattttttagctttaataaccttttctggcgacaacagatctttattatgagaatgcctcgtactgttacgaccttttgatggtgaatatctgttgtcactagaatgtgagatccttttagaagattctggtgcatatttaacagaacttgtccttccatcacttcctccattaaaagtatctgatacatgtgttggcccagaaatatctgaagaacttattctaccttttgagccatgatggtctttctttggaagcctaaaattctttaacattgatgattagcaaaaataatattttgttattcttctattctattttttttgatttcaccccttttattttattttatcgcaattgaaataagcctaaataatttttgttttctatggagttttattttatccaaaatagttatattatactgaatcctagttgtttatttgataagtctagaagaacctcaaaagaaattttctgcttaataatattcttttgacaaatgtaaaatcttccttctattctgtcaatctctcctctaatacttcttactatagtataatcaaagtacaataactaatatatgtatatatgttcctgtgtatttaaactgctattgtcttcttcgagatactcttcttcttatctttaattttttttctttcctgtccttcttttaatgtgaaattctaattttgtcactgaataaaaaaaaaatagagaaactacttatcaaaaaatttattaataaaggaagggcttattatagacaaaagcaaataatgccaatattatcaggagaaaggaaaactagaaacaaagtgggagagatgctggcaaaagctccactaaccaataaatatgcatgcatattgcataggtatattttatcataatgaataaagaaaaagtaaacaggaatatatggttatataactagtgtgataatataataaatagtacgtttcaattatgagttttcttagttcagctacttggtagaaatatgttacatactcttgtattcagtaatggttttcactcatccataaccatctatatgattacaagaaggtcagagttatattatatttttctctgttaacacaatgaattcaatcttaatttatttcgtataatttcaattgatcctctgtcatactgtattctaaccatgtaggcatacaattttcaacgtttaaattaggatatggagaaaacttgccagctacacagttgccattgcatctatcggaatcaaaaggtgattttgggcaattagtatatgggaaatgatgatatgcaatatctctgaaccaatgtatcctagatttatcagcaaataaagctaatgcaagacttcttactggtgcatcaccccatctttcgtaatagaaccctcctttagactccaaatgttccatatatctttcatatggttcagatctaagaaaatccaaattgttaatctcaaaatttgtccaaaaatggcatgtcgaatagccatttgtaatattgaaatttcgaggtttttgtatattttctttgatccactcaaatgcaccattcttattcaaataatgtgggttttctttaataaattcaaacgtggtttcccataaagtccttacagattgaggactatcatatagatttaatgtgaacccatatactttgtcatattgttccataaattggaaaacatcataatctatcttgcaatagaaattcacatttggttcaattctccacgcatatttataattacttaatacatcttgatgataaaatttacttgagtagaaacgacacatgttatgatacgataattttttggagtattgaacatcttcagcttctaatttatccatcgcttcattatattttgtcacatctatattccctggcctattccaatcgtttggatttatcttaacaaaatgtattagacgttccttaggtaatatttcccatattctttgtttaaaattatcagaaaattcttcatcattcataaaggtatatggatatccgaacttactattgaaagtgtcttctaattgcttgatggtagatataatagcattaatatctttattctgaactaatgataagattgtagcattggctttacctgcaagtggagttcctgggcgtaccaagccatcaacttgtggctcaataataggttgagcaagaattctatcgtataacttaaaattagcctttattttctcttctctttgtaaatcatccatcgtctggttatatagtggtgtttgtaacatttttagtatcgagtcataatcaactggttcctccactttcttgggtacggatgaatcatcggtattagatactggcctgtcttctttatcattgttgttgtctaaatcaggaagaaatgtatctacatagtccagcaactggttataagtgctaccagctaaatccatatgatttttagaaagatctaatattttataaaccataccacatattagtaatgcaataccaatacataaaaagattataagattcttcagtctgaaccttctaaacgtgaaaatatagttcctcagcataataattaggtaaacaaatagagcaatgttcttcaccggttgaaaaataagtcacctcctttatatatatatgtagtttatcagtaataccaacttgacagaataattgataatgaccgccaaataaaatcaaaccaactagtgaaaacaaaaaagagaaataaactgatgcacttatcttatatatatatgacacgacctgttctattatactgatttcgattagtacaagaactcaattcaactaattgttaatacagaacacagaaacttgcctctaccaataatcagcaatttttgacagtcttcctttcttttatctttctattaatacatattttcagctagtttacccgcacaataactttgttgatgtttcaggaaatttatttttttcatattttctttctttcttttaccagagaaggtaaaagcatttaatagaatgagtatatgtgtgtttgaaatacagaggccaacacacatgttaagaacaacataaagaacgtgtagagtatttgtagagtttctgtcaagaggtatagcagtacaagttaataaactacctttctgctagtagactgaattaataaaataagtaagtaagcaagcaaaatagttaactgaataaggtcatctggaactgccccattatttttttattatttaatctaactctttgtcttctggtcagttgcaaagcaaaatcttataaatacaaatgtcacaaaattcaaatccacaaacacctaaaaatcagtctaagcaaagttccaatggtggtaatcagcctggtcaatctcaacaacatcctcaacaacaaaatagacccactagtcaattttctgcacatgatttaaatagaattgtgctggaatatttgaataaaaaggggtaccatagaacagaagctatgcttagagctgaaagtggtcgtactttaactccacaaaacaaagattttttaaagacaaacaaaactgcaaaaatccctgagccatccaagaaaccaccgggaaatgataaaaatattaagcctgtgagtaatccaccaggtataataggtactaaaagagatgcagaaggtggaatagtgtctagacagctagaaactataaaagtaccagagaattatattagggcgtattcactattaaaaaactgggttgattcatcattggagatttataaatctgaattacattatatcatgtatccaattttcatttatatgtttttgaatttagttaaaaaggatgttttccaagctcgtagattttttgatagatattcatctgattttaaattatatcatagtggtgaaattaatagattgtttagtgtaaattcagtagatcatatcaaagaaaatgaaattgccagtgcatttaatgataataaatatagagtcaccatatcgaaaaccgtgttcaatttattgttgtatttcttgaatgaaaatgaaagtgtgggtggttctttagtcataagcatcatcaatcaatatctagaaccaaatgttgttaatacagtatcttccaaagtacaattagccgatggtattaagactttaaaaaatagagatactatagtagggattgactctactataaattctaaaccagtcaaattgggcccatttccaagagatgaggattatgtaaaagaagtagaaactgaattgaagatcagagatgagcaagaaaagcaacaactagagcaagcaaaggcaaatgcaaaaaatgattcaaataacgctgacagaataaattcacagacaaataaaatggtccaacattccactacattgttaaatgagtataaaatgttaaataatgaaataccaagagaaacacaaaccggttcatttgcatcaaatgacaaggagaaacatgatagttcatttattgacgataaagattgtaagaatagcttagccatgaatagagttcttcttcagataaatgagaagttagaatcaccatctcatgattcattgccattgcccccaaagacagcgttagatattaaactggaaattcaaaaagtgaaagaatccagagatgcaattaagctagataatttgcaagtttcattgcccacagtttgcatgtatactttccataacacaaaccgtggaatgacatcattagaatttagtgacgattcaagactggctgctgctgggtttcaagacagttatataaaattatggaccctggatgggtcatcattactaacgaacaggattccactatccaagagaaaagagatagaattgggtgatccttcaacaagtatgttgattggacatagtggtacagtatattcaacaagtttcagtcccgataacagatttttgatatcgggctcagaggatagaactgttagattgtggtcattggacactcataccgcattagtcagttacaaaggtcataatcaccctgtttgggatgttaaattttctccattaggtcattattttgctacagcgtcccatgaccaaacagctagattatggtcttcagatcacatttatccattacgtatatttgcagggcatttaagtgacgttgatactgtatccttccatccaaatggatgttatgtgtttactgggtctagtgataagacatgtcgtatgtgggatattaacagtggtgattcagtacgtctattccttggacatactgcgcctgtgctatccacagcagtgactccagatgggagatggttatgtagtggtagcgaagatggtataattaatgtttgggatataggcacgggtaagagattaaaacagatgcgtggacatggtaagaatgctgttcattcgctaacatttaacaaagagggcaatgtgttgattagtggtggggcagataacactgttcgtgtatgggatataaaaaaagcgacaaatgaaccaagtttagaacccgaagaaccgtttgtaggatatattggagatgtgacagcttctgtgaatcaagacatcaaagattacggtcgcagacgcactattataccaactaatgatcttgtagcttcattttataccaagaggacaccagtgtttaaagtcaaattcacaagaaacaatcttgtgcttgctggtggtgcatttagggacatatgaactagataagaaaataaggttgtttaaaaatgtatataaatatgaagaagaagaagaagaagaaaaggagataaagagaagtaattgacttctttttttttttcacacatgtaacgtttgttgtgtggatgtagataaatatgtatataatgatagaaaaaaagaaaaggtgtaattgaaatgtagtaatctttagcatattggaaaacccaaagaaaaaaacagcattatagtttttcaagttcaaaaagggtaaattttgattgaaagatattcatttgtttattttttttctttttttaaatagtttttttaattttgaagattctagtaaaatttgtcaaaacaaagaaaaataaagacagatctactcaaaaaaaaaaaattaactacctaaattaaaaaaaatgcaaaatactgaaattacgacaatttaaactagcatattccaactaattaacagtaaaaacaacaataacaacaacaacaacgacgacgatcttcatttaagttttactgatcatccaaagcaagatatatttatgttgacttcccgtattgtatgtgtccttccaaagtgcaaaaaaaataaatctatacatacatatacatatatatacatacatataaatatataaacttccatataatctacaaaatattggtagtgatggtagacacacaaagaatcaacctgtactacacataaaaaaaacaaaagagtacgccatcaatcacaagaccaattgtttatatataaaaagggaaaaaaataagggacagatcacctaaaaggaaaaaaaacaaaaacaaaaacaaaaaaaaaagttatacagcaacgcgtctagaactgcacttacacacattactacacgtaaatatacatagtgcaacaagacttgtgcaataaataaataaataatcaagtaaatgcacgtggtatagtcatgtcaccagaataggaagtagaatgcattaactaagggacgaaaatctaccatttttaggttaacagagaaacaaagaaacgaaggttaggaaacaataatggaaagtaatacagtgcctgaacttgttacaagtcaaaagacagtaactgacacaaagaacaatactgccaatagtgacagcaatactaatgagagctaccacagtagtaataatgaattctccactgaacacaatgggggaagaaaaaataaagaaaaaaagaaaactagaaacaaagagaagaaaaagaagattgtagagaataacaataacaacgacaacgacaatagcaacaataataatagtcataaaaataataatagcgacattatagtcacagacactaaatcatcagattatctcagtaataatgacagttctgttactatggaaacaaacggttccaaaacagttactaccaacgctacaagtagtaataatacatgggcggctattgacacattagatgatgtacgacaactggctaaagcgacaacagattcggataatttcaataaggaacaagaaaatgaattaaataagatgagacagaatcaaattaaattactaaaactgatgattgagaggaactcaaaactacagaagctggaaaaacccttggaggagagcaaaaataacgatactggtacggataacatcattacctttggatttgatacaaataataacaacaataatgatagtagcaaaaatgcagaacaatgtgataaagatacttgccacaacaaacattcgaaagagggcttagcaaaacctataaaagaatctactatcaaacaagaaaaagatgttataacagaaaatgaaggggaaggtctttcgatatcaccttctaagatatctaatcaaaagtcaatttatgttagtgactattttgagactctggatgatgttcaaatgatcactagaaaagaaagcgaatacattgaacagatggaaaaaattattgatgatagtagaatcgagaaattacatcacagcaaaaaaaacaattgcagtctataaatagttgcaaaaacagtgttgaatagatcattaaataacattctttaattatattcgaattcttattatttttttttctttaattctttttttagcatttttttccaaccttgccaatgacaaatactagagaagtaaatataaagatatctataatggcagaataatacggatagtaatgtactatgtcttttgtatattcctgttgttggtagcgtcgttgctccttgaaaaataaaatacatttccctcttaactcttgtttgttttatttcagggtttttttttctgtctcaatactctttttgcagcaacaataataaaaataaaaaaaacttaagataaaaagaaagaaaaaaaaagaccaaacagtctaaatttactggaagctgaaaaggatcgttacattaacacccatacatcttctagacttgaccgctttagtggaatctcaacttttgtttttgttgtttttttttttttaatctcttactcaaaagtaacattgtttatatatagactattaaggacttaacaaactaataaaaaatattgtagttactagttatatctaccatcttttagaataatatatcttaattaatactagatatacgtatatatagctggatctactcagtaggaatgccctcttaagttacctcatcaaataaagtcaagatgttcagctacttagctgccttctatatggaagcaacaagggtgtgtaaaatatttatctgaaagggttctacgcttgcagcgacaataacatactatatttaaatattcaacactaaaacaaaactacctacccattatttagcttatccgattatgtagttatgatcacatggaaccacatgtatattatcacttggtggtttgaaactcttgactcctgctatcaaactacgacttgtatgcagatgtatgggtgtgtttataacaccgatcgggagagatggcaaaacatctacatgtttttatttatcatccttattattattcttattattgacccagtttggggagggaggacagggaaaagatacgttgaatattttctttctttcttttttcttttggttctacctccgtctcttgaagagaagctggttgaatgagtgaaatgggtaaataaatgcataagtagagggaaaggagatcgttgtttgacaaggcaccctctacgccagcgtctgattgcatacaacaccatagcacttgctccttttccttttttttttttttttctttgacgcattcttgccttcaaacgatccttttccttcgtttctcttccctctggccctcaaacaaaacttggctttagaggttctttactctcatcttatttatattatctgcatcgattagttagttagttaactactacttaccactcccttcctacgcttatatgtattttcattctttataacacttctgtctctactatcctatctcttggttagttcctgttccttgcctcttttctttcttcttgacgtgtttgtcttttcttgagttccatacaactcaaagaacccatctatacatatacgtatatatatatagtgtacatacatattaaaaatgtcttctttctccaacttcaaattagctaccgatttaccagcttggaacaaattacaagccctttacgacagcgaaggtaagaacatctctgtcaagaaggaattccaaaatgacccaaaacgttttcaaaaattctcaaagaccttcaccaactacgatggttctaagatccttttcgatttctccaaaaacttaatcaacgacgaagtcctagctaacttgattgaattggctaaggaagctaatgtcaccggtttaagagactccatgttcgctggtgaacacattaatttcaccgaagaccgtgctgtctaccacgttgctttgagaaacagagccaacaagccaatgtacgttgacggtgtcaacgtcgctccagaagtcgattctgttttacaacacatgaaagaattctccgaacaagtccgttctggtgcttggaccggttacactggtaaaaagatcaccgatgttgtcaacattggtatcggtggttccgatttaggtccagttatggtcactgaagccttgaaacattacgccagtgacatcaaagttcacttcgtttctaacatcgatggtacccacttggctgaagtcctaaaggtcattaacgctgaaaccacccttttcttaatcgcttctaagaccttcactactgctgaaactatcaccaacgctaactccgctaaggcttggttcttagaacaagttggtggtgatgcttctcacattgctaagcattttgctgctttatccactaacaaggaagaagttgctaagttcggtattgacaccaagaacatgttcggtttcgaaaactgggttggtggtcgttactctgtgtggtccgctatcggtctttctgtcgccttatacattggtttcgacaactttgaagctttcttaaagggtgctgaagccgttgacaaacacttcactgaaaccccattagaagacaacatcccattattaggtggtttattatctgtctggtacaataacttctttggtgctcaaactcacttagtcgccccattcgaccaatacttacacagattcccagcttacttacaacaattatccatggaatccaacggtaaatctgttacccgtggtgatgtcttcaccaactactccactggatccatcttattcggtgaaccagctaccaacgctcaacactccttcttccaattggtccaccaaggtactaagttgatcccatccgatttcatcttagctgctcaatctcacaacccaattaccaacaacttgcaccaaaagatgttggcttccaacttcttcgctcaagctgaagctttaatggttggtaaggacgaagcacaagtcaaggctgaaggtgctactggtggtttggtcccacacaagatcttctctggtaacagaccaaccacctctattttggcccaaaagattaccccagccactttaggtgctttaattgcctactacgaacatgttaccttcactgaaggtgctatctggaacatcaactccttcgaccaatggggtgttgaattaggtaaggtcctagctaaggtcatcggtaaggaattagatgattcttccaagatctcttctcacgatgcttccaccaacggtttaatcaatcaattcaaggcttggatgtaaaagaagaaaccagtttgatcgaacattactgtattttcttctccaactgaactatcttgtaccacacctctctttttttatcacttatactattttatgaactaaattttatcttttgttttataaaataatatatatatatttatttacatgtaatgtgtatatgatatgaccattttttgtttaatattttgattgttatacgcaatatttttgcaatgggtatttctattggttttttagttgtagtgacaagaccttttttcgctaattgatttgttattattcatatttcctttttgtttctaggatggaattacagaagcaagaaaccatctacattaagtagggacaagataagaatcgaatgtgaatttctcaattcattcttctgatcaaaatatatcactacctcctttctcaccaacaatatacagtgttacccttaacaatcgcatgtaatcttaaagacttgtcctttagaaacaataatcagatgacgtgtttcatatatactgaaaaaccttgatactcctttatttctcaacacagaattgctaaattatccatttctctctcttctagcatatatatatgtatatactcatttttgtaaatatctatgggatatacgataacacaagcagcatttaaaattgttgagcttattaatgatctatctttttctttttcttggttgaaattttaaatggaatcacgaaacaacgattaaaagaaatgaaaaataatgacagattaagaggacttggtagaaattcttaatatactcaacgaatttttatacagaataactcccgattctatgaataattgataatattttgctctaggaaagaaatattgatcctgcaagtaacaaaaccatggaacaacagacaacttcaactattaattatggaattgacgaacaattacaactaaggtacagtcactggaagaaaaataccaagttgttatatgattatttaaacaccaacacttcaaaatggccatctttgacttgccaattttttcctgatctcgacatttcatctgatacacatcgtttgttattatcatcctttacctctggtcaattacctgaagatgaagctctatatattgctagtttgtcaacattaaagcatttgaactggtcaagtttaaataattttgatatggatgaattagaatttaaatcagataattcaattaaattcccaccaaaacatttgactactaatctgacaatcaaatttcctttaggcgactgtaatagagcaagatatatgccccagaacccggatgtaatcgctgccgcatcttccaatggtgatatctatatttttgatagaaccaaacatggttcaagaagaatcagaaaatctgtatatgatgaaaagagaagctctgagacccccgaaagtgatatcaacgatggattagatgcaacttatgaagccaagtttaatgaccaaattaataataaccaaaacaatagaaattttgaaactacgagtattgatattgatgaaatggattacattaaaactgaaaatgagaatgaagcactctcagtagcgtggaatttacaaaaagagggtactttagtagctgcatactcccaaggatcaattaaagtatgggatttaaaaaaatttaatcaaaatgacaaaaatatatgtaaagctgaatggagtattacacaatttgactctaatggttgtaacgatgctaactggatgccatcacatgattctatttttgctgcatctggtgaaagtaaggattcattagttctattcgatacaagaactcaaaaagaaacttcaagaatacgatctaagtttcataatagtggaatcaatgcatgtaaattcaactatggaaattctatgctgctggcttctgctgatactgatggaatagttaatttatgggatattagaaaattaaacgataaaccactaatgtcattgaaccatgattcctctatatctgtcatagagtggaatcctcacgaacatagtgttttagctactgcaggacaacaagatggtttaattaaattatgggatatatctcaagataatgccatgactaatgaaggtataacaaaacaattgatatttattcatgctggtcatatgctaggcgtgaatgacatatcatgggatctacacgatccatggctgatttcaagtgtttcaaatgataattcaatccatatttggaaacctgcatccaatattgtaaatccagcgtaatgaccatattttgcttttagttcccttatttataataatactaatcagatcgatatagaaatgtaaatatgatatataaaagtacatagatagtaactatagcattgcttactaagcactgtctatatatttattattaatatataaatacatacatacatatctactacctatatatctatccatacttgatatagtaaaccaatacacatatacagtttattcttcctgctttttccatttttctggcgaaagacctgctaaacgaggtttcagttctatcttacgtttgaatgttgctggattgtatgcaatctgtctttcaccaggtggtggaataccttttgggttccaatcaggatcatagaatatactctttctacctaaaccaccatctaccttcttggtatcttccttaggtttattgtcagacatcagagtcgataaacgaatgactctctacgaccaagatactatcttatacccgcaaacaaatgcacgtacacaaatacgtctttgttcacaagtctgcacatataatatatttgtatttcccaataaatggatcaatctaagacctgataacaaatattaactgcagcttttttcagattcttgaaaagtaaaaaaaaatgaatacaaaagagctcatttagactacagaatctttaaattttgatagcgtaaactattaaacaaagatcaacaattacaaaataaagcctaaaactaattctgagtagtagagagctgttataagccccaccactacactactatccaaacgagaaatagtaaccatgtctaataatgaaccaataaggtcaaaatccattacccatgtgtctcaaaacagtgatttgaaaatcgattacaatggtataccaagtcaagcattagatgccatacggatgagactggcacagctaatccattctttaaaaagaataagagatgagctatctaagccagacctaccacaacgttactccctacaatcacaattaaacatcactttgcaacaattattgtctgttacttcaacactagaacattttcacgaatcattagattcaactgtaatatacccactccctcaatttccaacaacttcacatgaaaaccttttgaccacacttttgagaaaaaagtatacaccagaagtggatcaatggttaggagaatctcgagaagctgcagaggttgataatagatggctaactgaaagtaaaattaaagacttattaaaaactgataataatatcacggaatgggcattgggggtgtttaataaagaatatgaaaagtataatgcacgaaatgaactagatgtacatcctgacaattctaagatggcagttgatgaggaagataaatacaatcattataaacctacaaaaccatttaaaatcgaaaaaattctatcgtacacttttaggggagaactttagaagtctatcatcatccctaaatagcaatagcgtatgtaattgtgtcgataaataaataaatacatcttaatgattgcatatatgatgaccatttatcgtattagaatctacaaatatgtatatacctatgtacaggcactactaactactaactagaacaaatggcatagtctaaaaaaaaaaacaaaaaaaagtctattatgtcatacaatcatcagtatcacatgcttcatgataaaagtttaataaccaactcccatgtcccaaacataattatactatttggaactgttctcatcagatgtggtgtcaacccactatacatggatgctaacccttcttccttaataatgattttgaaactctgtatcaaacctgtatacttcaatttattattctccataggggcttgtcttaatcttgttcgtactacttcatgtggataagtgactatactagcagcaaatttagctagcccagcacttccagatctttgacaccactctttaactttatcaattgtcgatttttgaccatcattattatggccaaatttttctattgatctctgtttaataatatatctcatttgttcatagagtaaccattgcaacactgtctccaccgagcccaaatatgaagcgctcaaacctttatacagcccataaaccccttcatgtcttactacacttttcaaacaatcccatgaatttttgtattgcttactagtgcctgctttacctagttgcattctggtcttgatcaaccaaattggatttgttgcagtagaagtggcaataccggctgtagcagcagccattagatggatccatgcaccttcttcccccttattaaatgctttagaatagagatcctttgtagtaccatatgtgaaaaaattaatacttcttgcagggataacaccgactaaattaggacccaaccctttaaacaaactagtaaagccttccatcctgtagacattggatataataccaactgtttctttgaaatgggtcccagcttgagccaagtagctcatagtgtttccggaatgggtactcgactgataagctttcttatagatatcactttgcaatctagttttaaccaaatcaaagggacatgttgctatagcaccggccataccacctattccacctgccacaaaatgaacccatggtttcacagttgggtgtgcttcaattttctcacacttaggatcaattggacccgaatttctaaaattggatgctttctcatcacttgccaagtatgcagaagactcaattgcttcttcttctaatttgctcaatggctttctagtcattattctttatcttttattttattttattattgtcctttttttttaaaaaaaataagcagtctcttaaattctaattttgtataatataattcttctcttttcttctttactaatgatgtaatatataggaacagaagaatatttgattatttacaggatttttataacataaataagtttaatataaaaaaaactttatcagataatgaggaaagagtccatataacacactattaacagggaattaatgacaaccgatttttttttaagaggtataatacagttatgatcagctagatctgaacggagaagctgttttatcactacaaaaaagactaatgccatcaaaaataactgtatagaagatatatacacatttcagtatcttctttgactttgtatttattaaagttttatttttgttttcaaaaaatttcagatacacaatgtccttctcggatttttccatagtaaacaaaaaaaaacaaaacagaagacgtacatataaaaccaacgatgaggttctctccacaacaaaaaaaatgtgtcacagtgccaacaatgtcagtaaaagaagtgacgcaatggtattgttaacagaaaactgtagcactacaagatactagctgtttcttattatcatctacgtttgtccctctgcatcaatttatttgcacacattattagccactactattatttctgtcactatgtattcctgactagtcttagcacccttttgcaacattattatggcttgtagtgtaaacatgaagaccggctcacagagattgatcataataattacagtaaggatatagagagaaataaggacaataaaatagcaatattactagatgtgatttagtataaggttgcattacactatacaacgtattgaaccatgttacaaaaaaacaataatttaatttatttatatatagtacaaaaaaaactaataacaataaacaaaattatcaattaatttattcttcgtcggcttcttcagcgccttcagagtgcttagcagcattctttctggcaactctacctggtctggcaccaccgaatggagaagtggaagcaaagtcaatgtgcttttcagagtctaatctgaccatgaaagatgggatattgacaatttgcttaccaacagcaatgtgtctttgggtaatcaaaactctagcatggtggatagacttagctaaacctaacttgtagacttgggtttgtaatcttctttccaagaaatcttcaaccttcaaagctaaaacataatctaacttcttcttgtcttcagataagacaccaactctaaccaatcttctgattaaagcattaccttcgaataatctctttgggtccttttcgtctctggttaataagtctctggcagcacgtctaatcttagataattggaaagaaattctgtaaatttctctcttgttctttagaccgtattcaccagccaacttcaattcggcatctaaacgagaagattcgtatggtctctttggagtagagtaagtcttagagtaagtgtttggagctcctgatcaaaaaataagaaaaaaaaacaaaaacagtacaatatcagagtgatatgtaaagaaaaataatacaaaagttacagtgtccccttttgctccataacaaatatgaggaaataaaaacttcgcattagggcataattgttagtaattcaattcttttaaggaaacaaacaaacgagttatgaataataataagataaagcaaatacaagcaatacaaagtgtgacgttcaagaacgagctacattacgtattattgaatattgatttctttttattgtagtatgtatataatggtgaaggagaagagccgtttctgatatctgaatcaataataaaaaacaagaaatatgattaataagcatcacagagaaacaaaataaaatgaaagaaagacagaaaacacaaaacactacatcaaattataataaataatatgatatagtagatatactttccatcctttctgtcactctcccttcctgttctcccttttctgctaaacctgtagttcccaagcatcactgaagtgtcgggaattcagtgccattggggtactactcacttcgtatctatatttttaattcctttctttcataaatatatcagataatacaaaaacactatttctctttccatttagatcatccatatacaaactttataatctcccccaccaccactcaatggcttagaagagagaagttaccaatattcaacaattcataatgaggacccgatcctcaaacaacacctattgcatgtacactcatatctatcccacgaattcataaatattaaatgaacatacttggcattgtgtcttatctaacttaggtctggcggggtatctcgactaggagaagcaaaaggttcatattacaaaacaacttacgataaataggagaggacctaagggaggaacacctatatataaaacaatacttattcctctcaatacatattaaaaggcagccatactttccccaactttgtttcagcaacccgtaactggacaccagaatattaaaccaccagacccaaaattacctgaaggcttcttgatgagatgttctatcataaattgaaataatttttttggagatggctaattttttttttgctgtttctacgatttccaactttttgcaaacctttcatttcaaaatatacacaaacaaacagtattactagtttgggaaatggagaaaataatagaattcatgaaccgttgttggattttaacagaatgtacggatgcattaaaaattctaagacagtcctcctttgggattcaaaatttgaaggctaggatgttttcattagcatttccttctgataataaatataaacacttttatcatgttatatgcacaggttgactgtctttagcatttcctaatttgattattagataagtaacatcattccaaaacctgtacatatatatatatatatatatatatatatatacatgcttgtatatattccacagcgtatacatactggtgacattacaagaattgatacacaacagagagctatatatcaatttgcgctactgcaactaggcacaatcgtacgagaatacgagatacaatgtatatttaaatgcctttacttgataatttagtagatttgagaaggcaaagattagaaaatttacggtcaaataataataataataataacgataataatagtaatagtaacaaggagaagaaatcttcaattttaccaaatattattgaccatactaatgatgatcttttaacgaaggataccaaattagaaaacaattctagcggtattcaaaatccaaataaaaattatgaaactgatgacgaagatcagaaaaaggaggaagaaccaaacggtcaacctgtgagtgttacacgagattttgaaataagattagattcgcaacttaaggttttagaatcacgtacgaatttagctttaaaaagaattcttagaagacaaatgtttcaaaaggacttgaatgaggaggatattggtgaaagcgacaaaataaaagaaagcataaatataaacacgtaaaggtggaaatattctataacgagtaaacatgtataacatacacacctaattaaatatatatatatatatatatatatatacgtacctgaatacatactttaattaacaaaaaaacaataaaggatagtcaggtgtatgaggaaatagaggaaagaggagaaactggcctgacctcctttttttgcatctttttttttcctttttttcaaaaagtgaaagcagaatataggtagatgactgcaaataagaagaagcagaatgcaccagctaaagtaactgttctcatactaatcttggaggccaaatatttaccaccgataacggcaaaaccacaacatataagatgacccacaacagcaccagctatagtaaaccgataattgttatcagaagccaaggcaatgatactaatctgtgaacgatcacctaattcagcaaagaaattaagaacaaagatttgaacccatgcaggcgagaagattagcgcagctagatcatatatcttattcaaaacagaaggttgttgtttctttgcatttaaaacactaccactttccatatcatccagtctagagttcatatcgttggcagcaagctcttcttctacctcagccatttcctcttccacacctgcgtctttagacatctctaagccttccatggtcaatttgtaaccaaaaataaggaacaataaagcagctaagaaggcagtataacgttcagagatgaaagaaatcacggcatgtcctacaataccagaaagaatagtcattatagctagggatgatgcagcagaagagaaaacaaagagtctagaatgacgcatagccattagaacagcaattaaaaaagttttatcaccgatctcagataaaccaatcatggagacagccataaaaaaagagtttaagcggtcgtttgacgacctgttttcattttgtaagccgatctcattagaattgaaattatttgcgacagcagcggctgttagatctgcagcagctactaaaattgaattattgtttaaaatagaattcaaaaagagaagtgataaaactgaaattgaaagcatcctttttcaaattttagatatataaaagataagagcggattgaagtatttattctttttttttttttttttcttcttcttcttcctcttctacttacttttgttcgttacgacatagacctcctaaatatcaagacattactaacagttgctaagcaatgaagtgtagacggacataacgcccttattaaatactggtatgttcacgaatgtttaaatgtcaagatcaccgatcgagtcagcgaagttttatcatgtttctttttcttttttttatttttttttcctacgttcctttccgttttggaattccccatcgagaaagaacggaaaatgcgggaatggacaggaaaaccggcggatctggaaatcccgaaaacacacagatttcccttgcttctcccctcataatttccctttatgcagcccgtgagtgttgatatcttgctcgagaagaaaggagatgggacagagggaaaggggtacaccactgacttgtcaatatataatctgtcttgtggcctgcttattttgtgtgttcccatgtataacggtttcaaaatatgttgatgtagtaacctgaatcatttttttaccatttaaccactttgaaagagtggtaaagtaacgactttgttgtattattgttaaaaaaaacatagctgggatacacaaaagagtatcacattggttacatatggttgtaaaagatagtatgtaatatgaaagacctagcaatttattgatattcatctttccctccttaccctcactcttttttttttttttatttttttactctatccttaacagcaattactccatattatctccttcaaagagagcacatataactctactagattactctcatagatactgttcaaaacagtcttacataacgccatcagtattttacttaacagaacacactcagacattgctgttgctactatcggtagcagtaccagtttcaagatctattttggcatattttattgacacaatctcaagtggaattgcctttattgtggggaaaaaaatgaaaagaaaaggaaagggtgttcaatcgtttcttttttcacaaatttacccattcgggaaaaatgttgaaaaattttttcattcttatctattatgataaaaaaataataagatcaacccagttaaaagaacagattagatgtacaaaatatgcctaaaataatctatcactactgggaagtttcataatataagtgttctgttgtaatataatacataattttcaaataagcaggggcgttacaaaaagataacatttatacaaggaaggagaagaagcaagagaaaaaaaaataataaaacaaataaactactctatgtccaaattaacagatcaaaaagatctttcttcattgtcctctaaccataaaagtaaaaagaaaaatggacttatgcgaaatgatgataatgacagtggtgatgatttagtgaaaggaactcttgatattgaatacgaagaagatgaactagagaaagactggtctgaagtcatcaaattaaataagaaaaatttgcaaatgatcataccaaaacgtggggagaaggattatgaaccagacggcactgatattcaagaactattgttatataaggcaagaaaggccatgtttgacgcactgtctaattctgtaagaggaactacaataaaacatcaagtaaaagcagtctatgattttgataagcataaagctttggtactcaatcctaaaggtgcttttcttcaaaccatgggtcatataactaataatggcgaattttggttggattttatggaatttttgtacttagccgaacgtggaaccataactccatattgtttaaaatcaaattcaatgaatctcaatcaattactgccctcgattgatgatcacaacttattaccattaagtatcgaagatatttacgcattttttaaaacacaaagagagattgatgagttttctgtttacagtcatttaaaaagactaggcttcattatcactaaagttgaggatgacgataatgacaataataaaattacattttcccctaaggtcggaccattcaaatctatctgtggttatcaacttcattctctatttaaacaaatcacatctttatttgtttcacataaaaataatcttttcaatggtttattttataatccatcgcattacaagtatattaaatacacatcaaccccacagatttacaataatttaaaacttttaattccacatgtagaggtgcctaaaactcttctggaattacaacacagaaaacaaagttatctgctcaataaaaataaaaatcattcaaataatcccctaaaattgacatttaacgtttggaaaccacaaactaactataagaagaagatccctgaattgcctgattaccaaatagtggtttacaataaaaatgataataaacaacatttcccaacaaatgatgatttaaaaaatatctttgattctttaaattacaaatttgaattcctagataaatcaaaaaaaaatgctggtacaatcaattgggatgatcattcttatataaacgggattccaagatcagccatactatctaagaatcagaagaaaaaaatcactaattcgcaatcagagacaataaataatataaaggaggagaaacgtaaaacattgaggaaacaaccatcatcatcagtttcttcttccaccccggcacatataaaacagattaaaagacttaaaaatggttataggtcgtttatattagctgtaatggataatggtattatcagttttatcaaaatatctgaagcagattttggatctgaagatgtttggtacgttccaactgttcaggcaaaaaagataaaaaaaccacaatatcaatataagaaaagaaacattatgaaacaaagcaacacagaccaaaaagtttagtatagataaaaaatttttcactccttcttatgatatatactcgggatatgtatatatatatatatataggcattgttgattttgggagaaaatcccattccaaaatatattcatttattttattgcataatatttttttaaacttcttttacctatttcccatatttaaagtacatattttcatcaaacacaggcgatttattgtaaaaggctgttggatttctttgaagttcacgttcttcatcttcataaggtgcattattatctaatatattagagtgttctgaaacaggctgtcttagaggtacttgtggggcattcctatggttggaatatgctggtggttcatccacaaatgatctagtaaaagtagttgaggaatccaataatgaaatgtttttttctgaagaaggtggtaagggaatagaagggacattgtgatgataagttctagcaggaacttcaggtgcactttgaacagtgtaatagttatttaccccagttatactgtcaatttttttgggaggctttggaggtaatccagcattcgtcatattggggtttggaacagaagaattaatatttaaattgccaaattgattatctaaattattcattaaagaatcaaggctatttcccacatatgaattaattgtcggtttatttttcaatttactcggttgttctggtaaagtaggaggcactggtgaaggcaaattgttattattggaaaatatgctgttgttggcattggttttgctggattccagcagttctttagacattgataacagtctatcataaaaatatagacccttttgaatatcagaagcaaaaattgaaaaattggttgcagccttttctaaattatcaaagaaatgttttctttctttttctctctttgtttcttccatattcttttcacgaaagccagacatggtaaaaattttatctagatcaatcttaatttcatttattaaagaaacttgtttataaatagctgcctctaacctcgaacttaatggttcaaatttttctaattctttattaaataattcttgaatttctgtatcagcagcatttttcaaattgattaatttacttgttatatcatcattgttaattgcttcttttaattctaataagatagcatttctttcttgtttaagatttgtcaaattcacatataataatttcactccatttagttcttggagtattttctccgtcttagtatcatcaatatccagtaggctaggttctgatgaagctggatcatcatattgattaaactgagaccataatgtattattatccattaatagagaaagttcagttaaataaggtttcactaaagatagcaatttttcgtcagacttagaagcttccaataaagaagattttattttaacagtattttccttttgtgattctggtaattggctcaatgtatcaacaatctctttccgcttagtcgtaattagtttagtctgctcctgaatatcactatacacacttgactgaacatttttactaaataaacgcaattgatctctcataaattctaattgtggattttctttattgtttaatctacccgatttatatcttttttctaaatctgttaataacacgggtaattttgtatattcaatgaaggaatcaaattctaaatttgaagtatcattggcttcaacctcacgtctaagtaaagatgctttctgttcagagtaaatgctttccttttcatagactttcattggaacgatacctttgtaaagaatgttacatttttcagatacagattgcatatatggatctactagttcattccatttaattggcctgatagcatccatggctttaatggtttctaataaggcaccctgcggtattgaatcgtgataaatgtaatcattatcttttatcaattgttgtgtttttagttcaatggtttctttgagtccattgaaatcgatataatccttcaaccaagctttaaagggtaatgcactgattaaagatgtatgtgcatatttactaaatgcaattgcctctccaaatttattctgctgttccaaagatatactatagtaatgagcagcgatggatctatacaaataagccttacatgacaaatttgtgttccatctaggctcaccatacacaataattccaccttcaggtttctttaagaaagtggaacattgatcgtataattcatatgtggttatggccaatttactaattaaagaggattgtttttctgtggtagaaggattattaatcagtttcaataaaaataattcttgtgcttgagcatgacataggtttgccaaaaactgagtattctctgcatgcaaatcgattgatggagaattgaaaaaattttccgctaaatatgtgaaacatgcaattgcttttgtcattgcagtaatcgatttcttataatcatctactagtgtttcttcggctacttgagtaaacagagtacctatattgaaaattatgcatgatttctcaaatgtcaacgtatgttgtgtatatttagtatctacttttgtgtttgttgaatagtccacatcgtaccatgtgaaattcaatttcaattgagtggaacggttacctagtctcatatctaattgttcaataaagcaataatattttaaattctgttccaacagagattcgggtgctaattcactattagcatttgtccttaaatgattcaattctttagctaaagcttcatcaaagaaatatgaccattgctggggtccataatttttttttagataactggacaatacctttttccaatcaataccttctgtatctttggcatgcagtttaattatagaaggtttcataatgataatgtatatgtttttattaacgtgaggaagagtaaaccaaactgagttaaaaataaataaatgaataaaagggactaagaatcaaataagtggtatattagatctcttgacaatagaatagaaattgattagatattagtggtagtagtagtagcagtaatgagatactctgcttgatcttttgttcatctgttttcgcagagttagtttctctttttttaggttcccctttttaatttctttgccaatgtttgattttttgcgccttcaaaagtttcccaaattatgatcgagaaagataaaagagatggtaggggcagcaattaatgtacaataatcaaaggcaaaatacatgcaatggtggtgaccacaataggatcttttcctcaatatagactgcctgggcaaatatcagagtgactttgtaaacgatagcagttaacttaggttcataaaggaatttattattattaaagaaaagggtatcaaagacagaagagaactaaaaataaaataaaaaaggacatgcaaactgttggaagagtaattaatactagtcccctgtgtagagaagtgaaaggttgtgcaggtattgtcacattattacctactacatattgtattagttatcaaagttatggatcatttagtaactttcaaggcaaacgttttcattctacttccaaactattattgaactcaaagaaatcatatgagataaataaagagctatctaaacgacatagtaagagtaaattacccgaattcaatcctaagtttatgggtgtggctacagaaatttttattcctgcatcaagaaaaaatctaccaagcatcatttcacaaccgatcgtggtgttcaaaacactgattagaagaatatatatgtttggtttgaacacatttaagattggattatttaggctacagtctgggaataaacctgaattcttgctttggaaaaataatgctataggaaattacatcgaagtcaataaagcctttgcgtcgaggagaatagataaagtgaagaatcatgtttctgtttgggtagagagggctcttttgctacgttctgaaagtttgccaaagaatattaaattgaattggcaggtggttaagttcaatgaagtgccgaaattaatgtccttggaccccatcatggtacctgggatgccacttgaatatattcaattggtatacagatttaatactaaacaagaattgataaagatcgacacagagactaaggagagtgaaaagcaggtaagagacattgtggattatttggtattcttgtgtgatacaaatacaaatgaaatgatgttatctggttctatctttgaaagtaaaccaggtgcaccattaccaaaacaagtcatggcaggtgataagaaaaaagttttagcacgtatgaaggaatgtggtgatattttcagattaccacctgaaaatattgagtaaatacagaaaagagagagaaatagagaggaggagaggtgtatatttatgtatatgcgtgtgtgtgtgttgttaacttttcacatgtttataattatttatcaacttgtaaatataatagaattaataagattgttaagtaagttctaattttttttattctaaatttatatgttgcttaatgaaattgttcgaaatttaaaactttttacctaaactattaaaacatcaacaaattgtcaaattatcaacttatcatataaaaatgttttttgtcctatttattctgtatgacacaaaatagcttcataactaaaatatatatcaatcttttctgtatagcaaagaattttctttgtaagtagttaagagaaaagagacacctattgaaaagtcatacaccatctatgcatgttttgttataattaaagagaaaggatagaaaattatagattacaagaagtaagttatattttaaatatagattttcagctgttttgcacgtttttatatagttatattgtaataagatatttgacatattaactaacaaaatccaagtcgtctttttctccatacatcaatacacacacacacatatatatatatatataatactcaataaaagtacatgcagatctattttcacatatatacacatgcttctcaacttttaaagggaggggaggggagaatactgagaaagatagcatttttcagtgacagatataaaaaacgttctttatctatgatattataactccacaatgttttctatgtttacctctgtagtaagtatatttttttttttttaagcatttttctgcttgtttagctttcaaaaaaaaaaaaagtccgaattttacacttttcaggaccggttaaactctaacatctggacatccattcgaaaagtaattatagtgttttttacgcgttgtgttttctgtgaaataaaagaaaatgaaaatgctgaaaatatgatttcctgttcaggaagtaacaagtgtctctgtctaatgggaaaaaataaacaaataattttaaacatatgcgctaaactctctcatgatcaaactgtaattcgtgcaaagaacggagaaacacacaagggacaaccattaacagagatacatccagagagaacgaaaaccatggagagaaggaactctagctctcctgtgagaagcagcatactatagggaaaattctctgccgcactctagctttgttccacccagacctgtcttccctttcccaccatgccaatgcgttccttttgaataggctaacattaaccagcacaccttccctcccagatctgtgtagagagcaaacaccacacctgtctcttcctaatttttctttctgtccctccacctttgcttttgcaccaagcctaaaccccacaacccttgtagctgagtttcgcagcagccctccttcccagtaacacaaactactggctagacagacagaaagaaacacacgagaaagtggaataaggagtcaataacaggccagagcatagaagcctttgaatctattctcatcccatacacatcctagcaaacatttactccaagcaaaggtcaatcattggtttttggaatatcgatatacgccctctcctgcatctgctgtatcagcatgtaatgtgtaggtgtgctccacccagtttgaccatcaaggccacctaatgaggatgagagagtaaagagaacaactgtagcaaaggttgaaagatttcaatgctttattgtagaagactgtttctacactcttgatggtgtcttgattaggctatatgtatgtgtataaaaacttcttcgctcaaatcatcgacagtagtaacccaatacaagacaagtgaggcatcatgaaggtatgttcgtaattataaggcacgaatagaaaaaaaagagtacagaactcaactgcttcggttatatcaattatcagtaatatttgaagaagctgcatgaaaaagaaagtgacacatacatggagaatatatacgaatgttagtcataatatccaatactacatataacactgaggtggaatatatttgtaacacatttaagtaaatatatgataacattcttttctaagataattttccaaagataagaaaagataacatgaaattacacaacatatccattgtttttattaattcaagatgtaaccaccaaaatattagttgaattaagtcaatctcaatgaataagttcgaattttttactaacaaacgataataatgatgagtatgatgataaatttttttatcccatatacattcattgattggtttttccctttctctcacattatgtgtgtttcctttcctttattttattatagttgaacatctcttacccagttaacggtactcaaaagtgtattgaaattgaagatgaacacagaatccgttccttctatgacaagagaatcggtcaagaagtcgatggtgaatctgttggtgatgaattcaaaggctacgtcttcaagattaccggtggtaacgataaacaaggtttcccaatgaaacaaggtgtcttattaccatccagagttaagttattattagccaagggtcactcttgttacagaccaagacgtactggtgaaagaaagagaaagtctgtcagaggtgccattgttggtccagatttagctgtcttatctttagtcatcgtcaagaagggtgatgaagaattcgacggtgtcaccaacgaaactgttccaaagagattaggtccaaagagagctaacaagatcagaaaattctttggtttgaccaaggaagatgacgtccgtgatttcgtcgttagaagagaagtcaccaagggtgaaaagacctacaccaaggctccaaagatccaaagattagtcactccacaaagattacaaagaaagagataccaaaaggctttgaagattaagaacgctcaagctcaaagagaagctgctgctgaatacgctcaattattagctaagagattagctgaaagaaaggctgaaaaggctgaagttagaaagagaagagcttcttctttaaaggcttaaattaattagtcagatgatttgttgatctaaaatgtattttataaatactgtctaatttattttatacttttacaccatttctttctaatttttttttgtatatttttttcgcctccccatttaataaattatatattaaaataaaatattgatttactcttataatttatctctaaatatcttagtggctcaaattaacctaatttcgctttgttattgctgctaactaactcttgattttaagatggatatgtacactctttttaactaaaagtgcaaaattccttgtgtggattgtgtaatatttgaaaaattaaatatataatgattaaatgattgaacgaacctacataactgtctgattatatattaaaaaaaatagtattcatgtacctattactgctgcctgtgttcacatattatattagatatacgaagtaaaattttgccatctacctgccctgtttaccaaccaggatattagacataatggtactatatttaccaggcccaacccagtaaagcaccaaccaatccccataacatcgcaaagtgtaaatattatagcagaacttattgcagctgccacattcctaaataaactactcactgcaacactactcgctgctctttttgacaacaattcagttaaatacgtcattgtagtattattacaccaagttaaacctgctgctgtcaacccagtgaaaaatagaattatggcaatatgaaatttcctttgaatactccaaccatatccaatacaacctgctgcgttaattatgataccaattatattaagtattaatctttcctccaaggggaaaacacggtttctatgtcttcttttccaattgttacgcaacatatcggatagatgaccacctatttgagaaccaaatatcatacagacacctggacagacatatgcagcaccaatttttagcattgaataatgatactcagattgcaaataatgggaaaatgtgacactaaacgcataataattggcaaacaaaagagccgtactgattgaggtgaagagaacaggtttaattttaaccatttcccaatatgtcataagtgttgctctaggtggttttggatattcttctctaaagtatacgctcaatgacacaggcttttgaattccaatgaatttacaaaatgaccaattagaattgttgaattcaagaagaacttgatcttcattctcatctagccgatcttgtttccaacctggatcaccattcccaacaatacatcttaaagtttcaggtaaaaaaaataacactaacagaaaccctacaccactcatgatacaagtaaaaccaaataaccatctccaattattatcgtcaattaatatcaacccagcaataataggtgctagaattggaccaatattagggcccatcataaaatatgctattgccttacctctattctttggtgcaataatgtcagtgacagtacctgcgcccaaagtgatgactgagctcgaagcaaatgcttgtacaattcttaaaatgaaaagtgacactatattactaggtaatgtcgataataaaacatttacaatcatcattaataacaatgaagttaaatagaggatttttctaccaccaatatctgcatacatcccccaaagtaaaggaccaacagcaaatacacccataaacactgatacagtagcattaattacagtagttgtggtcttaaattcctgttgtaacaaaggtaatgcaggaatataaatatttccggataatggtcctaagaaacctataaacattattataaaaaatatgacaaatttctgtgatttagtgaaacaactataaggtaagggtttaattggtcctggatttgatttttctgtatggacttcttctaaaactgcatcttttgaaacatcatcttcatcataactttctttaaaatattgtgaattgatattatacggtacatattgtccttctagtgcacctaaatgagggtgtccacttggcgaaaagcttgtattaatatcacaatctttatatgacatataagatatgtatagatatagatatatttgaatcgtaggagttgttgttagaaagttgagttttactggagattctctacactgccattcaatattaattttctcatattaccaattcatcttatttccaaatatacacttatatatatatatatagttgtattaattgaatcgtgttcctgtagagaacaaaaatagcaaagaaaatatttttattacatttcattgtattaaaaagagaataagtaacagcgagagaacattttaatttatcctatttctagcaatgaattatcagaaattttgtgaaatgccactaaatcaaaatgagcctattttttaataatatttgaagtttgccccagtgaatcaaaataatcaaaaaatagttagtagtatgatctgaattgataaaaacttcataatttttattttggagaaagaactattcagttcaatattttaagtctttaatagcaggtggcataccacttaatatagtcattagtaatagtattgctaccattctttttattattttcattcttttttttaatttttttatagataatatacaaatataaaatgaaatatataaatataaatattaaaacacgaatataatgctaattagactctaaaagaatcattattctttcctttaattattttttaatttagagaaatcttcctgtaaattaaaaaaaacaaaaacttctttttcttacaaaatatatggtataataatcacatacaatcaaagcctattattattactgttataatcataattatttttattatttataaaatctaacggaaatcggtcttaccattactacgcttaccagagaataagtgttttggtaaagaaactgtagtatgtctatcagcttcacctcttctagcatttctatttctctctcttctttgtaatttactcaatctatcagccttggatctttgagaaccatctgctacaccatccagcaatctatcagattgccttagcttaccaccattagcagaatcattggaagcaataacttctgaagcagcagcattcatgatgacatcagcaccagtttcaacatatctattcttctcggcagcggctctatgtttatcttgtaatgaagtcaaatcatgacctaagatagataaatgtctttccatttcatcaaacgatttggttaacttggaacgtggcatgatagctttattttttaaggactttctgtttcttgcctctttgatcatagtcttttgcttatttctaatccaagcagccttagctctgatatcattgacttcatctgcatcatagccttcgaatgtgtcttcgtcgtcgtcagaatcgtagaaaccttctctttccagcctctcttcctcttcttcaagagcttgtagttttgcagcaatatctggatccaagaaatcataaacgtttttaccatccaagatctctggcataacgtcgttcttccaatcatcatcctcaagaatatatttttctttcaagttgatgttatagacacccgcaccaccattttcagcttcaatgtccttggccaatttccgtctgtttggatcatttggatcatacttgacttgattcttgaaggactcaggcacataaggcaatctttccacatcgtctcttgcctgaggtttagccacatggattttattaagcacgttgttgattcttgcttgagatttcaatttgctttcgattctggaagccaacagtttttcacaagcatggtttctgacttccatgatgttatcttccaaatgacatgagatggtcataatttccacaccaggcacagtcttgattgagtctaataactttgaacggtcttcgtccagatcttctggtctgataatatcggttttgttgacgacaaccatgacagacttgtttgcaaacaagggtttaatagaatggaacaatttgacttgtgcttcgacggtgaaaccacactgttcagaaagatccatgaaatacaagacgcaagaccttaagtgtgcaatagcgtagatggattgcatttcgatgttgttcatctcttcggtaggtctgtcaaggatacctggggtatcgatagcttggaacctcaaatatttataatcgaaatggcccacgtatagggactttgtggtgaaggcataaggttggacctcgacgtctgctttagtgatgcatcttaaaaaggaggatttcccgacgtttggatacccacagatcaaaagggttcttgtatttgggtcgatggatgggagtctgcctaaatgttgtctaacctgttccaaatagttcaaggggtccttcagttttttgacaatggtggccattctacccagagctgctcttttcaattgtttacattggaataaagattgaccaaatttcaacaatctgatgtagtcacgagacacttgttctacaagggtctttgcacaggcaaccgcagccaaagagatcttgtagtgattcttttcgtacagggtgtccatcaagtccctgtggaaagggtggacgtcgttgatgttagggaaccccttgatgatttcatcgaatttttctacaaaaccttcaccagtgaatttcactttacgcatatagaaggctctgattcttgtaattttaaagcccggtctaacgacggtgggagtctttctttgggttctgttaagaacaatatctagcaattcattggatgatgccacagtaggaatatctttccaggacagttgcatggttagttaaatagtaggagttactttggtatgtgtgatttattatattataagtaaaaacaggaataagccaaaaaaaacaaaacaaaacaaaaaaacacaaaataatgatgaaatatatgcaataatgtcctcttccttccactccttctgcttgttctttctcttgttcttctctttatttttctttttaaaaagagagtcaatacacaataattgttattatctaaggcatagagagaaagagagagagagtatatgtgtacgatacaatgagatgagatgagatgagatgaacattattcaagaactgaagtttgatcaagaaagaaacaaaaagaaaaaaaaaaaaaaaataaatccaaaaccttgaaaaattttccatcacgtcatttcacacgaaaaaaagaaaaccagagcaatatggggaggtatgggtgtggacacatccttcttttcccgcggaaagaaaaagaatttgccctccgcggaatacaaaactgcaaaaaatgcaaaaaaaaaataaaatgaaataaaataaaggcaagtttcacaatgaataacatataaatatatcttatatcttatgtataagccatgggatatgttatagactatgctataaactatgctataactatgttacgcaatgaaataatattagtgtagactgaagctaacctgaatatataggaatagatacacgcttgcgatcaacgtttgccttcaaacacacacacactctctccctctctctccctctctccccccccttctgtatatttcacttgtacccgtaacgatcttacataatcgcattcttcatttactccattgcactaccagaagctaatctctatgaacgtgtgtgtatgtgtgtgtgtccattgcagattctcatttccagtagaacgaaaataaaaagtttcaattccatcattttttataaagtcttttcttctttttcgtttcttcttcttctttttttttttttatttgtctatttgtttatttctctgctgtttactccgaacggttactaagaaaggggacaatgtaggaaagaaaaaaaaaaaagaatgagagaatgaagcaagaagaaagaaatatcagaaagctagcagagaataaacagagtcatgaagagttgtgagataaataggttgtatagttatataacgagtaattctatggaatagattctatagttctactatatcgtctaatgtctatacttttattatagaaacggtttagttatatcatcacacacacgttcacatacgcaagtccacatggatgaagatggtacaaaaatcaatcaaaaatggttcatctgatgaatcatcctcctttagttctcaaaataatgacagcacaccttctattaagccttctttggtatattcacgtaatgataagtcattgaaaaaatgctcggatgactctttttcgcaaaatcaaacctatcagaccatttatgacaattactcagatttaatcaacgagcctggagaagaagaagaagaagaaaacatctctaatcattttgatatctcaaaacagagaagaaacagttcagatacaagattcatctctgcacaactctcccagtggaactacaataataataaagctatattaaatagagtcattaatcatgtattagatctcataaaccaaattcaaacagaaaacgataaaagacctatccatattgtattaagtaatagtaccgcagaaaacaatatcaaacttcgtatactagatttgaatattaaaatcgatggaacctataacattaataatagcatagatccatctaattttaataccaaagttaaagataagattattattactactactactactaccaccactcctcctcctccttctcttcctcttcccattcctaaccataataataacaatagtaacaacaataataatttatttgatttagatagaaatgcattatctaaattatttaaattaaaattaactaatattcataatcacttaaaatctttacaagaaagagtagacgacgtctcttcaaaagtgtttatcaccggtgatgtaaatacagggaaatcttccttttgcaactctctgctaagaagaaaattattgcctgaagaccaattgccttgtacaaatgtcttttgtgagattttagaggctagagataacggtaatgttgaagagattcatgctattttaaacgataaatcaaacaacaaaaacaattctaccttattcaaatatagtattaaggataaatccacttatgaagttcatcaattatccgaattggatgatttagtacagagaaatgacaagtataaacttttaaaagtttatatcaaagacgataaaagagaccctgaagaaagcttgcttaggaacggtactgtcgacatatccttgattgattcccctggcttaaatatcgattccatacaaaccgcagaagtcatgacaaaacaagaagagatcgatcttgtcatttttgtggtcaatgcagagaatcaattgactttgtctgcacaggatttcattaaagtcgcatcaagagaaaaaaaattaatgtttttcgttattaaaaaattcgataaaattaaagataaacaaagatgtaagcaactgatacttaatcaaatccaaaatttgtcccctgagacttataaaaatgggaaggatttcattcacttcctagaaaaagatctcgatcgatatccattcaatacaccaacaaaagggaaccctgatcctgatgattctgatgatcctgatgatggttggaatgatccagattttgaaaatttagagaattctttaagaaattttgtgttaaagaaaagatcaatgtccaaattattacctgcaaagactttccttctcaaaatcttaaatgatttggagataatatccaaatataatatcgaaagtcttaatgatgaaacaaaaaatattaatgatgaattaaataaattattacaagatgtgatagatacgaaatcacattatgacaaatttattaaaaaaattgatacacttgtagagaccactataactaatgtttataataaaactaaagaaaatattgattcatctctgtcttttgatattaataacaactatttacccaagtatcaaggattatcaaaaatttatgactatgttattgaaactgaacgattcattaaaagtaacatacaagagagtatacttaacagtgaatcaaatgcacgccaacagactgatttagccgtacaaaatatttatactttagtaagaaataatatggatccaaatttcatggaagaacgtcaattcgatagtaatcgcatgtttatgtgtcgataccatttatctgctaaacagtttgatgtacatatccatctgtctgatctatacgcaccttcttgggaaaaatttctagaatacattggagttccaatattactcaatcctataagtttaaatgaaaatactaaaacaacaaacaaaaatagtgatctagagaaacaattggtgaataaacaattacaaaaaaacaacgaactcggtactactcaaaataccctcaccacagttcttggtttaacattatatccattaacaaaatatatgaaacaaccttcactaattttcacttcaaaactacccacattggctatttattcttttggaggttctcagattgtgaaagctatagtatggaacgggattcaaactttttcattcaaaactttgactcatattgcaggctctactattgtggttagttgtttgttaggtatctcatatttagtatacgatttacctagagcattaccattaaatctagcaaatagatacaaacaaaaactgacagaattaaattttagccatattaatgcaaaacgtgtttctcaagaagtagctacagtattaaaagttccaacaagagaaattgtaaagacatgtgaaattgaagttaataaaaaagaatctactaagtatgatttagaggctaaaagagataagtacagaatatcgcttactttttttgaacacattctaaatgctacaaccacccagaaggctgttgtggagggtctagatctagaagttgattaaatttttataaatattcttacaaaaaaacaatgtgaatacatttatttatataaatctaatatagttcaaggaattatcttatttttttttcctttcattgttttactaaataccattctagataaatgaaaaaggaaggggcaggttctatctaaatttcagccgaagattagctctgtaacttactatctctgtcttccctgtgttacaatatgaatgttcttgactccttcattgaaaacaatctcacacaatttctaacataatattattttcattgaaattttgagattggggtttttcaagatttcaaaaacattgtgcatcttatttatttatttatttttttaattttattggtgtacaaagtaaagaatgtggacaattaataggagtagttctaaagccaagccacgataaaacagtattaatagtcttcaatgagtaatttctttgaccactaagtcatttaaatcaggtgaatgcgtatagttaactacttatattttgattttattcacctgcttctttatagctttgttacgctctatatatacataaagacgttattaatattagtaacacctaaatagtttagaccctttgtgcgacgtttaattcctatcaaatttgataaaaagtttcttttatgagcaaagatagtagtaattctcaatttaaaattttccaagacgttgtctcaagtattatcttaacagatgatcataatattccttctgaactgagatttaataaagttcgacagatgccaataattaggcagacaatggaaagcaatgtgtatatgtttccctcaattcaaagttatgatgcctataaaaacaacaataaagaattttgtttgaatgaggatggggttggcattcctctatttacatttgaagtttgtaaatttactgagtataatccagataattcttcggaaaaaataaggtataaaatatatatttatattttaaaaggtgtcttagaaactcctccatttgattacgaatgcattattaaatctaacgataaatttaatatttacaaatgtctcttttgtaccatatccaaaaaattaaaatggtttagtatcatatataacatgtcaataaaagaaaccacagaaaaagtatactacatcatatccaagggtttaaaattagatgtgttaatggatgattatattattcgttggaataatacacataaagtattaagggacacaggattcaaagctcgaatcctaccaattgaaaccaagtcacatttcgattcaatcaaggaatttaaaacttccaccccatattataaccaagctcttataaaaaagaaacgtgacaacactgataactatgttactgaaccccaagtatatccgtttgacacacacggtacaaaagttctgatgacggaacctcaaaaacattttatcggacgttataccacagatggtgcaggcgggttttcaaataaagtggctattgtatatgttggggaatatggttcattaaattcatttgggatcaccaatattccattcacaactaaattattggcatgtcaagcactgcttctccatagaattgaagcaacaaggcgaatgaaaagacaaaataattatactaattacgcaataggtatgatgtggtaaatctgcatatacttaataatacacggtatatatatatatatatatacgcttattaaaggacattaaatcatatgcattgaattatccatccactaatatactattatcccagagatgcttgtgcccattagagttttcaaaatatcacatgatgaatttaacatttcctttctctttttatttctattttttttttttttcgataaagcattctttcggggataacagagtaaacccgaagataaataaaatatctcaaaagatttttcaaataaataagcaaatgtttgacaagaaaagaaatagagagacaaacaggtcttaaaaatatatatataaatccttcagtctccatgggttgaatctcattctgaacattaatacactcttataagatatgaattgccttctccttggttcctttgttgcttttttcattttattttttttttttggatcttttgatctcttgattctacatttatagagaattcagtagatagatataaacaagaaaaaaaagtaggaagaaacaggactaaactgaaccaggaagacaaatggcgacagaaggggatttattaaaagatattaatacatggccagtcctaaatcccttccattgggggtttaatggtaccgttaaccatcgtattggtgctaaggggactgtagaattacatttaaataagaagaatctggcacaaaatgatttgaattcacaggatacagttactttggaccagtttgtcaaggaatatattcctggtttaaaagatggtgctaagtttcaattggataagaagttgtttaccggtattttacagactatgtatcttggaagtggtgatttcagtaagaaatttcctgtgttttacggtagagaaattgtgcacttttctgacaatggtgtctgtacagctgattgggttatgaatgggccatggagacaaaaatatcattttgatccattgacaggtgagttcaacaaacatttattcaatgaagatgaagaagccactcatccagagaattggccacgcttacaaccaagaactagatacttaagtgatgaagaattgaaggatcttcatagtgaagaaaacattgaacgtccgttaattgttatattacatggtctagcaggcggttcacacgaacctattattagatctttaacgaatcatttgtctaaagtcggtaacggtaaatttcaagtggtggtcctaaactcaagaggttgtgcacggtccaagattaccacaccttgcttgttcactgcataccattatttggatgtcaaagagtttttggaacgtgaaagagcaagaaatccaaagagaaaaatgtatgcgattgggtgttcctttggtgctactatgttggctaattacctaggatttgttggagagaagaccccgttaagtgcggcagctactttttgtaacccgtgggatatggttcttgcatcatacaagataaataaagatttttggtcacaacacattttcagtcaaactgtgactcaattcttagttagaatggttaaagtgaacatgaaggagttagaagtacctgagggaactaaacccacacatattccaacaccggagaatccattgttccatggattcacacagtccaatttgaagaaggcatataagatgaaatctttatctgagttcgacacaatgtttactgcaccagcgttaggttttaaagatgctatggattattaccaacatgctagttctgtaaatagattgaataagataagtattccactgttgtctgttaattccagtgatgatccagttgtaggtgcggatcacattccaatgcattatttagatgaaaatccaaatgttttggtgtgtgagacagacttaggtggtcatttagcatatttgcaaagtgacggtgattcttgggctaccaggcaaattagtaatttctttgataagtttgatgagtatgtcatgtaagtaaaataatatatatatacatcctattattgttattgatagtaatattattagataaatgcttgttatataaaggttagatattctttcttgtatcttttctttttatattcgaataacaaaagactaaattaggagaaaaaaacaaaaataaataaataaataactaactaaagattgaaaaagaagaaagagaaaaaccaaaatgaaaaagaaaacattattgaaccatttcatctttcccttacgtattggatctatgcttgtgataggagaataactagaagtgacaagagtctgcagaaaaagcttgcaaaaagtaattttcatgaaacagaggactgtgggacttacggtgctatctgtgaccatctccgttgttgtactagtgatatctagtttcatttatgccagagacaactctacgaaggtgtattattggtgttggatatggctattacccatggcagtatggtgttgggtggtcactgcatggtgcgatttccagttgttcaaaaatgccaaaccggtcggttactagacaaataaaccatgtctcgatgactatttgatcaaacgcaaacaaatacactaaatatttggatatattctattatgtatgtatatagacagatatatgtatgtgtgtgtgtttgtgtttgtgtgtgtattttctttcatctcttcttctaaatttaacagaaagataaatggaatacgtcttaaagttgcaagaacttcccttttgggtaatttcatcttcattgggtagtgatgttttgttttgttttgtttttctctttttttctgttttctctgttttctccacaagtcgctgctgatttgagaggaggaagaaggacggatttcctttggttgtggggaatcagtggcattagctgatctctgaagatgtggtgctggtgatgattgtgatggtcgtagtgaaagatctttgcatcttggtaggcaaaagatgatcttctttaggggaaacaagagatagatataaagaataaatagatatataaataaacactgtggtcacgaagtcagaaagtatacatacatacatacgtacatacacatatatgtatacatatcacatatattatcggtataatatcagtataataataattgaaaaatgcctccagttagacaagtctatggacaagaagaagtttcaaactgggccaagttcaaaatggggctgatgatgggaactgcagtcggtgtttgtaccggtgttatgtttggtgggttcacaatcttgactcaaggtgccggtccagatggtgtagttagaaccttaggtaaatatatcgctggttctgctgccacctttggtatgttcatgtctatcggttcagttattagaagtgagggctcggaagatactatgtataacaacaaaagtatactgcagctacaacaaagagccaaatttgaagcatggaaagctaagactcaattgatccaccgttttgacccacaacaaaattaattataatagtataaatttttgtatatgttttatacccaaatcctttcttaaaaaaacaaaaaaaaaaaagaaaagaacaaaacaataatatatggaattgtgtttgaaggggaattgatgcttgtatatatatatagatagatagataaatggatagattgattgataaatacatatttatctgtttatttattcatttatttatttatttatttatgaatttatatctatgtatctctgtattaaattgtgtaacttctttctttttttctttttcattattcatgattaataccgtgataataacctgatcatcacaacagaggcaccctattttagcttagtgtcatggtggataatggttattgacttggaattcaattttatgctgtttgtgtagaacactaacttcttttcattaagaaaaaaaaagaatttcttactttaaagggaaaaaaacaaatatatatattatatatatatatatatgtgtgtgtgatttaaaaggaagaacataaagtgtgataaatagtgcaacagaaatattctacaagaaaacaacaaaacacaaaatatacattagctatacattagcccacagagttatttaatagtaagatcacaaatatttatagcgattattatgtcagtccaaagtgtataaccggaaaataaaataagtctaagaaagaaaataaataaaaaagaaaacgcaaattattaaagagctcttttaggcatatataatccaatgtcagaagccattgtaaattcatatttgcacgcacctgttccaaataaagtatcatctcaatcacagccacaatcacgatcacgatcacgatcacaatacaaagatactttgtcacacaccaacaatataacttacatcgataatcacataaatagtatttctcaaaagagtactgatcccataccatatgtaaaatttatatttccagatataagagctatttaccagttaaataaagcaaatccctttcacggtattgtatataatgaagtaacaattcatggattcgaactgtacctagtggaaaattgggtcgcacaaagaggattatcttccattattacatcctttactgggaattcacaggatattattcatggtatagagatggttttacctgcagattatgaacattggccacccgttttaaaaaaatattacgatgaacttataactttctctcaaccaaaatttaacgataaatttcaatgtatcctttttataacaaatctgtctactcttcctttatctttgcatatcttgcacattgaaaatggtgatttaagatctgtttggtcgacttttaaaattaatttcaatttaaaatcaatgaactgcttaggtaggtcttctaatttgctaatggaaccttccaattcttctatagagaaatttaaccatctattcaaattatcagcaccaaatccatcatctaaaatcaattcaggctattcaactaataataatcataatagtgctttgaaaaatggttctggaaatccagaaaactggagttattatgctatcacagatattattcaaacggtccaaattgcactgcattattttaacagctataatcatgctcaagatggattgttatgtgatttcacaaaggcagcaattaataattggtgggttgattatggaaaactttattttggtatggaaggtcctagaaatgaaacagttttaaatcctaccacttacgccgcaatcatatctttgacttttgcaatatattacaagttaattctggaaaattgtatgaattctaaacatccgttccataatatcgatgaatattttttggctatctcacttttccaaaagaaaattaactattcaagaagagatgggaaagtatatttagatcatataactttagaaaaattatttgaagctacagcaaaatataatactaataaagacttacttcatttgaaaagaaaaatgaaatctaaaatgcaagacttaactggaaaatcaaatactgcaagattatctcatgaaattttaactactgatctggataatttaatatcaaatttgcatgatagtgataatgatttaacctatttatggaaaccatcccatagtaacaaatttatctctttgtcggcaaatataagagattttacacaatataattttcatcatggagatactgacaaagaattaaaactacgtactcaattgttgaacaattccaagaagccctcctttaccgaaccttttaaaaggcacagatcccattttagtgtacacaatttcgtagaaagtaggtatgcatcagatataacgaatagaccaacattagatatgtccccttcatttataagtatatcttccatgttccctatgtatgataatccaagtgacaacttcgatggccaatataataatgaaaattatcaagaagagtatttcaggaggaattcacttccctttattaacgatggtaccagagatactgatgaatacgcatgcaagaatattttcatatatagatcaaattcacaatcaaatattgcagagtctattgaaagatgggatttgccgtttgatccgtcaatagtgaaattagcaagagatttgaaacggattgatcttaaattattgagacaagaacgatctgaaaatgaagaacaaatttgttctgaagataagatctgtgacagtaatttagctaaatttgatgcattgaccgaggatattcaaaaggaaattgataaatacaaagaaaattctgggtatttccaaacacaatttttggctctcaaaaataaacaaaatctggcttataatgatgtgtctgaaataacatcattgtctgctaaattgaattatgatatgagaattttggaattgagagttagagatgtggaagatagtattaagcagtttgataccaaactatgtcaagtgaaaaagtcgttaattggcttggataatgatgacaaagaattctgtaaagctatgtcatgtattgatgataaatcccagtttgatagttgtataaagaaattagtacaattagaaaataagagtacatgttataagagtgtatgttcgagcatactaaaaaagtgttttttacttgatttaaagaaggatattatgagttgggtagattatttttttgcacatacatagggatgacttggccgcctacaaaactcaacttttaatgccattttgtgaaattaaaaaaggaggaaaaccatatgcaaatttctttggttattgtataactatattatacaactattaaggtagcatcaaaatgtttgtttattctctagcatttctatgtaatgaagcttttacattgcatatctgaaaaactagaaataatttttttgctacctaatatgaataaccaaatctatgaataatatacatgtattagtctatatctaaaacagttcatatccttaaaaaaatgaattaattaattttcagagttgtttttaaaacatactttgtcatattgtaaaatcaaccactatattattattaagttataggattgatgcttgaaattttacattaataataataatagtaaaatattggtatattatcatttattcaacatcttttaatcattagcaagatcattgagcaataatatttaaaaaacatgtttttattctaatcatatatacattaaaaaaaattaatggaatgaatatacacagaaacttatatatattatttcataatttgccttcatattttaagatttgagcagcagtatcatgaatagtctttttcaaattaactaactcaaaaccaagaatcctcctggtttttgaattgtcaatgatacaaccttgtggaccaacgccaagaacacccatatgtggttttccaattggtatttggccctttaaacaatcgaagtcttcatttaatatatctgcaatatcttgagacgaaaatttaccagcatataacatcaatctttggccaacagcttccttactctggaaggcaattaaatgggcctttgcgacgtcacgaacatctacataaccagcatatatacctgctggtttgaatagaccatcagaaggagtatggattaaagaattaaccaattcacaagaagtgttcaattttgtggtaacatcatcatcaaatctttgagggccaaaaacatatgctggattaacggtagataatttgaattggacaatatctctatttttttctaagaaatcccaagctgccttttcagctaattttttagacccacaatatgccctaccagcattagcttggcacgcttcccaatcgtctggattccaattgctttcatcaactatgaaagtactatcattctctctttcaaatgtctttatagcagcataactagatgtaataactacacgttctactgtatcagcggcatattttttaatcgattctaagatacctttagtgccttgaatagcaggatttaaaagatctttgacatactcagtagtttcaaaatggaatggggaggcggtatgtataatgtatttaatctccttggcgtgttttctgattacctcatcaaaagcatttggtttggagatatcttcaacaatttctaaagttaaattaggaatgttaccaaattgtttattaaaaaggttgatcttagtttgagatctaactgtaccaataactttgtaattttgttctagcaattggccaacaatatgataaaaccagtagcaccagagacgaaaacagacattattgcactagtaaatatgtacaatatttttactgtcggaaataaacgcaatataataacctattaaatggcctactttgtaagtgagttaacagacaactatgacatacaacttggtattttttgtaactgtgtctgtctatgttgaaatgatggatcagatcttaatcatatcttagactccgagaattatatttgggggtgtagatgttgcaggttgttcggattataaaaataatttttcttttgatagtttctgctgtatctaacattagagaaagtgagaaatatttgggaaaatccttgcataggcaaacaagattcatttttcattgtacactctgttctgaattactattattaattattttatactttaaatagttatattcttaacggttgatgttattgttataattaatcaccatatttgaaaatgatgaatagttcttcaatatctatatttatgtatatgagacttctttccatatatcgctgataaatgtaaatatatatatatgtatgtatattatttcaatacgtaattcatatcataacctatctaaaaatgttagtttttaaatcaaatttacatttatatcaatagctctattgagataatatttgttatagaaaggttatttgactactgaaaacattgtaatactactttagaatatttttaaaatactgagcaatacatgaattctatcaaataatgatatttatcaataatacatatatacataataaaccttttaaagtcctcttcttaatcatcatcaatgtacaatgtatctaatatgaattgaatgataaattgtttttgtgacaataatgatatttaaataaaagataactagttgaaagtatagattaagtatagttaaatataacgagatggtttatgaattttgattatgataaactgttttggtctttataaaaatatcttttaaaaatatttttggttaatcgcaaacatattacttcaagttacaatatcactcaaaaagttcaaataatgatctattgaccaaatatctagagttcagcgtattgacttatcttaatagtcaggtgactgtccaagttgttataaaatatattatggtttctagcattatcatattatatattatttgtaggtatggacgtgatatttgtaagtataatgattaaataaacatctcaaacctagtttgttgaaatctcaattgatgtataaatatctaaatgaaagtatttaagaaccagataatagacataactatgtttatgtcgaatatattgtgttctttgttagttttggtgtaaatattcagatgtccattattcctttattagagtgaggttaagattggtacgataataataaagaatgcaatgatcataccttttattataaaagtatcatctcatagatttaaaatttatctaattcaatgtggttgtgcaatattttaataatatttaaaatatttttgtgaataaaagactaacagtaataagaaattttcttttcaaataaaaaatatgcaaaaatattattttatcggtagaacacatttggttgttttaacattatgatcaaattaaattttgaaatttgtagatattcataaaatacatataagatgatgtttattggattctttttactcctcatgaaaatatattatgataagatgtcagaaaataataatataccttgaatcataataagatcaagttaatttctaaagaagatagagtctactaatgctttcttgaatattagattgataatttgttaggttactggtttatcataattacttctttaatgttgttctatcttcaaaaatctcagtaagatttctctatatgttaaatagaaaaattaacatgagagaatgaagtgaaagtatagatggtcaaattactatttcttatattgaaattttgataatatcataggatgttagcttgcttatattaggatattagtggaaatctaactctaaattatattcaatagttcttttattctatataattgatatacagggtataatatataatacaacttttttatattgagtcttcttcaatacaaaattttttaacactttcagctattattataataaatttagattaataaaggtatcgctaaacattttttaacattagctcacctgatgtactaaactgtatatagtaatgttaatactacacatatactcacaaattagaaagttattaattttaattgacaaattgataatacaacccatgttattatttttaaaataaataatatttcttagatagagcttgaaaaaaaactataataagcatatttttgttgataattatatctgttactctttcataataatcagagttttcttgactaagtttctctgcgatttagtgccaacattatttcgactgttttactaacacattcatagccagtatataaatagttgcctattctaaatttttcattttaacattcagctaaatcacatattttatgatttccaactagaacttcttttgtttaaaaaggttttcaaagttacgttatttttatacagagttacactaatttagctgattatatgaatttatttgaaattttaagaaaaataaaaaaaaattgttatgggttacagaagtgattaattatagaactcctaaacaatactttgtgaaataagatttttaagaaagagaaatataaactaatcatatttcaacatatactagacagtgaaaatttaaatatatttcttttaaatatcactaaactttgatctaattatttttttacttttgcgattcataagaaaaaacttcatcaatagatacataagtaaaaccaagaattttgcatatcatatttttttatttcatctacattttttctgtgatattgttatttctatattatttatgaagaagaaataggaaaatattcattacattattaatagtgttaaatatataatagttataattgaaaatatgtgcaatatattgactacaaataagcactccttctcaacaaaacactaatctcacatgctgatttcttttatcactttatttttgttagtttttaaataaaacttccaaaccaaagaatcttgcttttagtctttttggaacatatctaaaaggcttctaaacaaatcttttattttctttagattgaatagtaggattttctgaattgatatagaaataaacaaaaatcattcttaaaaaacaacaagctctccaaaattcttctttgcctctttttctattccccatcttcttcagtaccaaaaaacactttaacaaaagataaaatatttctagtagaacgtattctaaaaaaaataatttgataaacacaacgttagttacttctcaaagcataaaaaaaaatcaaagctatacagaaacataatttacacagaaaactacagaagaaaatagacaataacaacacaatctatgataatataatcactattttgttattgatttacagataattcaagcacccaaatattgagtaaggacataacaaaccacctttggatatctttcttacaagcaaatagtaagcttactaaacctttcttaagaaactgaaaattttggtaatgaacccagtaatctattggaactgactaatgttgacaaaccgtcaaataatagttctaaatttggtgcagttagtgaaaataatgctacaataagacattaaagaaaattagtcaactaagttcattttgattttctgatataaataccgcaacatattcattaatgattccaaaaaaaaaattaaaatcaaattataaattgtctaatgaacctattaaattatgttgatggattatcgataacgaataagctgtggaaaaatgaaacaatgaacacaaacaatacaaatactccactttttagtttattgattaactgtactggttgggttgaaaatcagaaataaattgagagattagtgaaaaaaacacgcaattctgggattgcttttttttttttttcctattgtagaacaactattatagaagttattgtacatatacttatgtatttgttttaccacagtggaaaaaatgtttttttttgcttggttcaggtaatttttaaaaaatttttgtgatttttaacctccataaacctatttccaaacatattgtttttgttgtacttattatataccaccctacttgcaacaatagtttcgtagtaaaagaaatattgcaatttcattgcaccctaatcaaaaaaaaccatagctgctgtcttttatgaatctatgagcaacttttatggagtgatcgaaatctataaataaaaataaaaatcttacattatagtatcagatacaaatgtaattcatagaaaattctagattctccttaagaacaaagtggagattattttgttatttccggaacaataaaggattatgcaggaaatagcaataaaaaaattaaacattgtctattctttgaagaatatttttgccacgatataaagaaaaagaaacaaaagaattaaaattgtcgaccatgaaaaaaattttttcttttttttttttctttcattccgtgaaaaattttcaatcgtaaaatttattggatatcgcaaattccgtttaaaaacaaaagcgtcatagcacgtgattcttcctctttttcctgtttttttctcactggttttttcttgagaaaaaaatttttttcttttttggtgtatcttcaactttttttgagatcccaatttttagaatagaagtcttattcttgttaatttatcacaataacatactttgcacctcataatctaataacgtttttcaatgaagatacaaacacgaagacaaaagaataatcctcttttcgtaatcagctacgattaatatttttatttttattttaaataatgtgttccttctgtgtttcttattcttcatcgatatggtgaagaaaaattctacgactttatcaaactattgttttgtttcatcctctgattaggcttttcttttcttgaaaaattaaaaaaaatctttacaggtggagaactcaagaaaaaagcaaagaatacaataaaaaagaatatactaattatttatgcttccactttattcctttccttaatacaatgctgactgatttaacgttcggaagaaaatgaaaaaaaagttaacaatagaatttgtcgggtttcggttcaaataaagtattgacgtaacaatagctatcaaagacaatatatgcaagtattctggactattgttcattatttccaccctagaagttggaatgctgtgaaaaattccgctcactattttcttagttttggtaaaaacgagtattacccttcttccaatgtacaaaaagaaaaaagaaatggctgcaaagacctatcaactatgacatatccaaaatatgaaatgcaaaatttaattagaagaaatatgctagcaatactcatacaaacccaataaattatagcgaaataagaaattattccaaatccttaaacacaaattatggaaagttgttgaactaactgattttcaacaagaaatgtgctatgtttactttgcgctattcaatagaatatatatatatatatgttacaaattaacacttgtatttgttgaataacatgaatatattcccaactatagtttataattcttataaagttaaccgtataaataattaaactaaaactctttttttctctctcttgtacatagcatagaaataattttatatagaaagtatgcataacgtgaaaaatacgacattaagaaattcttagttttaatatacgtgaatattttcttttctgtctggcatttattaaaatcccattgttctacttatttcattctagaacaacttattttaataatttcactacttcagagaaaaaatcatttcttatgtatttatgaaataaattagcaaatagacaactaatttgtaataaacacttaaacattgaaatatctaagtatgcttgttttttattttgtttcaatcataatatatggtgagaagaatcaactttcacattttgtaatacttagtactagaaaaaatgtcacaccgttttatttcagcgaaaaacaaaggaaaaaacatatgatatttccgtgaaccctactttgtttttgttccgtggaataaacgtttaccaaattttttacttgaaaaactcgacagctctataaaaaagaaaaacaataggatatgcagatctttttataccaccaaaagaccattctgaaatggtcaaaatgtattatgcataatatataccagcatatacatattcaaaaaagaatctagatcttgctggttactctggtttgattatttgtcatacatacttataaaacaaaaatatataaacatgtatatatatctgcatttgaacagtttgtaaattgatctttatttttgttcttttgagttttactttctcctattttttttttttcgtgattcttgttcttgtgcgttttccacagaaaaatcttcgaaaaaaaaccaacaaaaaatattaattggataagataaacaaaaaaaaaataaagtgagataaaacaaaaattaactactactcatttttgttatacttagaatgcagatattaattttgtggtcactattaggactacttgtgaccaaagtaagtgttgctactacaactatttcaacaccaacaaccttgtctggtgatcaaacgttttctgatgatatcgtaattgaatcaggggctactctcgcattagtatctggttcatcatattccttcaatggtaatattgatgttaaaggttctttagacatcatcggtgattcaacaaacgggttaactagtctacaatttggttctactacaacaattacaaacagtggtaacatcaacattgagaatattaaatctgcaggttctgctagtgattttgttattgcacctgcaagtattgataactctggtacatttactgtttcacaattaaatgctgccgctactgtaccaggtaccaattttactttagctccaactggctccttcattaatacaggtacaattgactatgatacggctggtaaaggaggcactacaaatggattcctttaccttggtactataactaataatggtatcattaattctggtggattttcagcactaacatctgatggactttatagcactcatagtagatacaaaatgagaggtattatcttcaataatcctattgaaggtaaaggtgtagttactggtaatgctggagctacaattcttcttaacacagatattctaggaggacaaacttttagtatcaacaaggctatgtatttaattaatccaaaaattgtaccaagttcacttaaaattgtaaattttgtctattctgcaatagtattcttaggtatagattttcaacaatggattaatgaaaattttggtgcagtgaaaggcaccatgcaaattaattatggggtagatggccaccagtactggtttaattcaagttgtccatatggctatgtaacaaaccaaatatcttttagtgttgtgccatctgatcctaaatatcaacttgatggtaccttcgtattaattactcaacaattgagcggtaaccaatgtacatggttatctgaaccagttattaagacaacaacagttaccactgtagattctattactaaagctaccactatttcaactttaacaatatctacgactaaccagtatttctatactgtgcctgaattcatttatgaagttgctgtacctgcattatctactacctacactactcttactacatcgattaccacccctactacatcaatatataccacaactgttaccgacacagaaggatctgtcaccgaagaagttgtagttgttgtccaaacaccaccattatctacatcctacacaactataacatatcctgttactgccccaacctcatccacattcacggcaactgttaccgatacagctggatctaaaactgaaaaagttgttgttattgttctcaccccacctccatccacttcctacaccactattactagtcgattcgcatttccaaaaacatctacctataccaccacacttgttgacaacaatggttcttcatccccagaagttgttgtggttgttgtcaccccgcctccactcactatccacacctctactacttcggacatcgaggaaccaactagtactacctacactaccacagttcttgatatccaaggctctccatctccagaagttgttgtggtttatatcaacccatctcgatctacttcttacaccatttctactgcagatgttacagaaccaaccacatctacttacaccaccacaatcactgatagcaacggatctttaactagtgaggttgttattcttgtgattacaccaacgccatctactacttacactactactaccgcagatattgcagaactaacaaccaccacgtacactacaacgtatattgatggtgacgcttcttcaactgctgagattgttgttgtagtgattactccattgtcacccaccatctacacaactactactgcagatgtcacaaaactaactacaactacatacaccactaaggttactgatagcaacgggtcttcattttcagaggttgttgttgtagttgtcactccatccccatctacttcctacactactattactgcggatatttctgccccaactacaactacttacaccactactagcacagacagtaacggctctttatccccagaggttgttattatagtgattacaccgtctccatctacctcctacactaccaccactgcggatgtttctgctccaatcacaactacttacactactaccatcacagaaagcaatggctcttcatccccagaggttgttgttgttgtggttactccagctccatctactatctacaccactaccacaggtccagtttctgccccaaccacaactacttacactactacagttgttgatagcaatgggtctttatccccagaggttgttgttgtagtgattacaccgtctccatctacctcctacactaccaccactgcggatgtttctgctccaatcacaactacttacactactaccatcacagaaagcaatggctcttcatccccagaggttgttgttgttgtggttactccagctccatctactatctacactacaactacaggtccagtttctgccccaaccacaactacttacacaaccactgttactgacagcaatggctcttcctctccagaggttgttgttgttgtgatcactccagctccatctaccttctatacgaccactactggggatgtctctgccttgaccacatctaccttcaccaccactattactaacagcaatggctcttcctctccagaggttgttgttgttgtgatcactccagctccatctaccttctatacgaccactactgcggatgtttctgctccaactacaaccacctacacaaccactgttactgatagcaatggctcttcctctccagaggttgttgttgttgtgatcaccccatctccaagtggcccaactatctacaccactactactggggatgtctctgccttgaccacatctaccttcaccaccactgttactgatagcaatggctcttcctctccagaggttgttgttgttgtgatcactccagctccatctaccttctatacgaccactactggggatgtctctgccttgaccacatctaccttcaccaccactattactaacagcaatggctcttcctctccagaggttgttgttgttgtgatcaccccatctccaagtggcccaactatctacaccactactactggggatgtctctgccttgaccacatctaccttcaccaccactgttactgatagcaatggctcttcctctccagaggttgttgttgttgtgatcactccagctccatctaccttctatacgaccactactggggatgtctctgccttgaccacatctaccttcaccaccactattactaacagcaatggctcttcctctccagaggttgttgttgttgtgatcactccagctccatctaccttctatacgaccactactgcggatgtttctgctccaactacaaccacctacacaaccactgttactgatagcaatggctcttcctctccagaggttgttgttgttgtgatcactccagctccaagtggcccaactatctacactactactactgcggatgtttctgctccaactacaaccaccttcaccaccactgttactgatagcaatggctcttcctctccagaagttgttgttgttgtgatcactccatctccaagtggcccaactatctacaccactactactggggatgtctctgctccaactacaaccacctacacaaccactgttactgatagcaatggctcttcctctccagaggttgttgttgttgtgatcaccccatctccaagtggcccaactatctacaccactactactggggatgtctctgccttgaccacatctaccttcaccaccactgttactgatagcaatggctcttcctctccagaggttgttgttgttgtgatcactccagctccaagtggcccaactatctacactactactactgcggatgtttctgccttgaccacatctaccttcaccaccactattactaacagcaatggctctttatccccagaggttgttgttgttgtaatcaccccatctccaagtggcccaactatctacatcactactactgcggatgtttttactccaatcacatctaccttcaccaccactattactaacagcaatggctctttatccccagaggttgttgttgttgtggttactccagctccatctactatctacaccactactactgtggatatttcttctccaatcacaactacttacaccactaccatcacagacagtaacggctcttcatccgctgaagttgttgtagtagtgatcaccccatctccatttaatagctttataacatcatcaatttctgtaccatctcctctctacggaaattccacaatttctggtgaaaaaactgaacctattttgactgacactttagttgttttgactacagttgttaatggagttactatgactacaacttattgtccagaaccatctgcaacttctgaaacaggtatgactgcgatcattggacacagttctattgaatctgtttatactgattcaaggaaccaacaagaagagactaactcatttactactgctacaaatgtgactccagttatttctattgcttctaccaccacgggtctagcatttaccaatggtgaaaatcacccaacatctagaaactctagaacatctaccactgtaatcggtaataatgagtctagaagatcagaaacatcgatgccttcaatggtgccgcaagtttcccaatatgtttctgaacaaccatcctcatcatcaattgctatcacagtacctcatgaaggcgtaccttctcttgtatcatatgaaggtaaaggtagcaccatgtatatgatgaagtggagtgttgcccattgcattggtttattattattcatggtaatttaaattgattaaaggcaaaaaattttaaaataaagaattctaaataatttaataattaaatatttctatataagtatatagtattctaatattttttatattgtgtatttttattatttatttaatttccaaatagcttgtacagcacaaatagatttgctcattcctaataaaccatcaatatcttcttttaattttaaatagtttagattattcaatacaattatgcaatctaatagttgctatatagacattttaatacatgtatatttttgctacatgttttggcaatttttaataaagagattgtgattaggaaatttacttctgtataaatcaattgatcatggtttaaaggatataaggtctttaaatcttttctaattaagaaaaattgtaattgtgaagatttgatgctagtttaattcaaagatcataataaaaggtttgacacatgtcttaaaaacagctacaatctttctttacctgcatttactgaaaagttaactagacaaatgtatttattcccatattccttaattattttctttctgtcctctgtatatacaaatacatccatagggaacacataatacatacatatatacatggatgtacactaattaaataccactgtatcttgctaagtcaaataactatatatatgtatacttgtgttaatatagtcactgttattaactcgcttaaacttatggttatacttctatttctttcttttttgtaatataatattcaattgtacgtaagctaacatatccaataactattgtactcacatgaacagtagagacatactatagaattactctaacaatatttgaagaaatggagattccttttaggtagcaaaggaaaaaagggaaagaaagagaaataacatgctatttcccaaatgcagagaattgcacactgatgatatattatacttactctacatgttaagaatattatacacaaaaatgtagatacacagaatttcgtaatgtaccttattttgaaaacatatgatatctctttttgtcttttactgggtgtagaactttcaagatttacaagatacaggagaatgtcccctctatatgtgaaaaatattgtaataataataataataataattatccaaggattccgataatgtgaaaattttctttttaaataaggaacatgtaaaactatcataacacagtcgtatttttgcaaatgttaattcatagatatattatgtcttgttattttaatgttataatgcaattaaactcttattacttttttttgaatttcaatatcttctcatgactcttggttacaattagagatccatacacagtattaaacatccagctataataatgtcagattaactcttaaaaagagtaaatttcctgaatattaaattgataaattttcatgttaatattccaccacagtatattcttaaatgttgttcaatgttcaaagattaagataaaatttctctctattatattatcttgtcaaacattaaaataagatcatctgaataaaagacacaacaaaaattattgaacagggaaagtagcaccgtagaatggaataaagatataatcaaactattattcattatattaaatcaatgtatcttttatcatcattaccataagcattggaaatcaaacataaatcaaatacatctataataagattggaattagtaaggataaatatcctgtaagatatgaataaaaagattatacagtaaatttatttattgatatagcataattgtatctatgtttataacagttatcattatgtgttaatttcaaaagagtattgcatatgatcataaattattataacagtatcattcgatggataatgaagtgatgtggaagatataattatatttttcatattgaaaatattagtaagggatagtgttcatgtaatattggaatatgctttaatagatatatttattatgacagtagtagtataacagtaaatggttatggcctattaataaatgtcttccttagtcacaatctaggtatgaaataagttgttatgagggtattctctatagccagttatgaatgattattaggtgtacaatgatgtaactataccatcttaaatagtggtttggcaatgttcaaagttataccatatagtaagcatatcgtaactgtttatttatggttagatggatctgcattttatatggttgtcaatgagtgtggttattattgtaattgatttttttttttttttcgaactattttttcaaattttgaaacaaggaaaattgacaattgaaatttgaatgaaatgagattggtggataatgaaaagaaaatgatggctgatgctaagagtaattaagtgtgatatgtttgtacagtatcattcttgtctaagacataatatcaagagaagttgtatattaatgaggagttcatagtttaagagtgataccatacaatctaccagttattaatgtccaaatgaagtaagcagttcaagagtaaagacataattgaaagaaatagtggttgatatgaacttagtctattatgtataaatccatagtaaagatacacattaatatcatgatgacagacactgtgaataacattgtatgttataggtttaaaagagcaataaaatttactggatgatattaccatattaaacatagaaatgtgggtgtaagtatgagatgtaatagagtaatcattgatgattcagattaatccagtgtattaagtttacgttgtttacatcttttctacattctacatatgaaaagagaatggtctaaatttattgatctatttatcataaaacaaatgactctatcgttgttatttttattgtttcgaaaattgtggttcactcatattttgtgatttaaagaaagagatagtaatatatatgtttcagaaactttttaaaaggagctcattgttttgtttacattgatatagttggtagattaagtataaattgttcatataatcaattgacatgggaaaagatatcttggatggtttccagagaactatgagaaatgttatgtgtttaataatacaaaactattgttcagaaaacaagatcgatccaacaacaatctgcaattctcacatatggtaaaaactagaaatctgtaaaacctgtttaaagctttcatttttgagataacttttgataaacgaaactgtgttaaacaactatattatccttccactatttctattcaggtgtttgttctataaaaaatatttaaaaaataatatttaatttaaataatcttacttgtttatgtatatcataagcatacttttataaagtcaacctttagggttagaaccccaaagaaaccaaatgtgatgtttttttttttttttttttttttccttttgccataacactaaaaatgtatttcaagtctttaaaaagagtagaaagttgtataaaaagttgcatgaagagtattaaatattcaaaagataaacaagatactaaatctttaccaccaactgtccttttattaaagttgtgtatacatacaacaaacaaaataagaattgtatgagaaacataacaacagggcattggaattcacacacaatatttgttttcctactcatgtttgttcttgttttttttttttcttgttattttttcgctttgcccccctcccccctcgcctccgacggcatctgtgtgtttttatttttttatataggttgcaccattttttttcttcttttttgtttttgtttttcccgaacaatggctccactttttcgaagattgggatatttttgtattggaaaaaccctaaaaatccttaatggcgggtaatcccgtccttagtattcgaaataaaaaaaaaaacgcaaaaaaacacaataaaaaaaacaggaaaaaacaagaacaaacaagaaaattttcttttttttttttcattgtagatcatcgttttcgggcggaaagaaaaaattcttattttctcaaaagaagaaagcacacattccatacacaaatcacagtattcattaatgtatgacacaatgctgactcttacccattaagcaccatagataacactactatgttctctattgtttatctttttttttttatgccagattattgtaatctgtaatacttttattactttttaccgggtgggaaatcctcaaataaaaaaacaaaacaaaacaaagcaaaacaaaacaaaacagtgtgtatatatatatatatatttataaagatttcaacagaatgcatggtattataaatctaaaacagtctcatctccaagctattaattttaaagatctgatttctatgtttcatttggaaatttttgctttaatacttatcttcccgttcgatgacgagaaatgcatatccacctaaagtgaaaaaatatctcactaaataaatcataatatacatccatatattaattcccgcatcaagacagtttcttttttttttttttcccctttttttatttgatcttttgagatataatcatatctttgcaaatcttaataaatataacacaacatggtattccattataagagcctcatcgcaatactgttaagtttacatacatatttgcaatttgcttcagctgcctttgcacctgctgcatgtaaaattccagaggacggtatcactggggccaccgtcagatattttaactaccctctatatgatgttactagttataaaaacataagttttttactaggtggctatctaaacaatccatataatggtacaatcactggtgttctaaatctagcatgggattcaggctggccagcaatcaatcctccttatggatatactggcgtccctatttctaacttcctgatggagattaccggttattataaagctccaatgaccggtctttatactatctccactagagtcgatgattccgttacaattttcatgggtgccggtgttgcatttgaatgttgtggccaacataaagattttgtggccacaaacttcgttttttcaaatactggtagtgcagaatttggtatgggtacagctgcacgtgctatatacatggaagaaggttactattatcctttcaaggttgtgtatattaactacatgcaaagaggggtattagatatttcaataacttggccaaatggtactgtagatgatactataggtaatcatctacgtagtattccagattctaataaatgttcagacatacctttcacctatactggttttaaagcatacacaacaacaacgtctaccatcaaaactacaatacctggcatatacgcagttactactacttctacacgtacaattacatcaaacattaataactataacgatgaagttgtaattatctactacgaggcagatccaacatcaacatataccctttcgactacaacttcctacaccagaggtttggtcagttctgctactgctgtctccacattcacttcctatgtcactgattccaacggtaacagcaccccagtggatgttgttattatcgagactccaattccaagtactgttacatcctacaccagaggtttagttagttctgctactactatctctacattcacttccttcaccaccgactccaacggtaacagcaccccagtggatgttgttattatcgagactccaattccaagtactgttacatcctacaccagaggtttggtcagttctgctactactatctccacattcacttcctatgtcactgattccagcggtaacagcaccccagttgatgttgttattatcgagactccaattccaagtactgttacatcctacaccagaggtttggtcagttctgctactgctgtctccacattcacttcctatgtcactgattccagcggtaacagcaccccagtggatgttgttattatcgagactccaattccaagtactgttacatcctacaccagaggtttagttagttctgctactactatctccacattcacttcctatgtcactgattccagcggtaacagcaccccagttgatgttgttattatcgagactccaattccaagtactgttacatcctacaccagaggtttagttagttctgctactactatctccacattcacttcctatgtcactgattccagcggtaacagcaccccagttgatgttgttattatcgagactccaattccaagtactgttacatcctacaccagaggtttggtcagttctgctactgctgtctccacattcacttcctatgtcactgattccagcggtaacagcaccccagtggatgttgttattatcgagactccaattccaagtactgttacatcctacaccagaggtttggtcagttctgctactgctgtctccacattcacttccttcactaccgactccaacggtaacagcaccccagttgatgttgttattatcgagactccaattccaagtactgttacatcctacaccagaggtttggtcagttctgctactgctatctctacattcacttccttcactaccgactccaacggtaacagcaccccagttgatgttgttattatcgagactccaattccaagtactgttacatcctacaccagaggtttggtcagttctgctactgctgtctccacattcacttccttcactaccgactccaacggtaacagcaccccagttgatgttgttattatcgagactccaattccaagtactgttacatcctacaccagaggtttggtcagttctgctactgctgtctccacattcacttcctatgtcactgattccaacggtaacagcaccccagttgatgttgttattatcgagactccaattccaagtactgttacatcctacaccagaggtttggtcagttctgctactgctgtctccacattcacttccttcactaccgactccaacggtaacagcaccccagttgatgttgttattatcgagactccaattccaagtactgttacatcctacaccagaggtttagttagttctgctactgctatctctacattcacttccttcactaccgactccaacggtaacagcaccccagttgatgttgttattatcgagactccaattccaagtactgttacatcctacaccagaggtttggtcagttctgctactgctatctctacattcacttccttcactaccgactccaacggtaacagcaccccagttgatgttgttattatcgagactccaattccaagtactgttacatcctacaccagaggtttggtcagttctgctactgctatctctacattcacttccttcactaccgactccaacggtaacagcaccccagttgatgttgttattatcgagactccaattccaagtactgttacatcctacaccagaggtttggtcagttctgctactactatctctacattcacttccttcactaccgactccaacggtaacagcaccccagttgatgttgttattatcgagactccaattccaagtactgttacatcctacaccagaggtttagttagttctgctactactatctctacattcacttccttcactaccgactccaacggtaacagcaccccagttgatgttgttattatcgagactccaattccaagtactgttacatcctacaccagaggtttggtcagttctgctactgctatctctacattcacttccttcactaccgactccaacggtaacagcaccccagttgatgttgttattatcgagactccaattccaagtactgttacatcctacaccagaggtttggtcagttctgctactgctgtctccacattcacttccttcactaccgactccaacggtaacagcaccccagttgatgttgttattatcgagactccaattccaagtactgttacatcctacaccagaggtttggtcagttctgctactgctatctctacattcacttccttcactaccgactccaacggtaacagcaccccagttgatgttgttattatcgagactccaattccaagtactgttacatcctacaccagaggtttagttagttctgctactactatctctacattcacttccttcactaccgactccaacggtaacagcaccccagttgatgttgttattatcgagactccaattccaagtactgttacatcctacaccagaggtttggtcagttctgctactgctatctctacattcacttccttcactaccgactccaacggtaacagcaccccagttgatgttgttattatcgagactccaattccaagtactgttacatcctacaccagaggtttggtcagttctgctactgctgtctccacattcacttccttcactaccgactccaacggtaacagcaccccagttgatgttgttattatcgagactccaattccaagtactgttacatcctacaccagaggtttggtcagttctgctactgctatctctacattcacttccttcactaccgactccaacggtaacagcaccccagttgatgttgttattatcgagactccaattccaagtactgttacatcctacaccagaggtttagttagttctgctactactatctccacattcacttcctatgtcactgattccaacggtaacagcaccccagttgatgttgttattatcgagactccaatgccaaacagagttacttcgtactgtagagatttgataaccgtaagctgtactatttctactttaacatcctttatgaccactacaggtactgtctctgtcccaattacaactacttatacaaccaccgtcactaacagcaacggctcttcctcttctgaggttgttgttgctataatcatcccatctccccttagtggctctataacatcatcaatttctgtaccatatcccctctacggaaactccacaatttctggtaagaaagctgaatctattttgactgacactttagttgttttgactacagttgttaatggagttactatgactacaacttattgtccagaaccatctgcaacttctgaaacaggtatgactgcgatcattggacacagttctattgaatctgtttatactgattcaaggaaccaacaagaagagactaactcatttactactgctacaaatgtgactccagttatttctattgcttctaccaccacgggtctagcatttaccaatggtgaaaatcacccaacatctagaaactctagaacatctaccactgtaatcggtaataatgagtctagaagatcagaaacatcgatgccttcaatggtgccgcaagtttcccaatatgtttctgaacaaccatcctcatcatcaattgctatcacagtacctcatgaaggcgtaccttctcttgtatcatatgaaggtaagggtggtactatgtacgtgaaatggagtattgcccattgcattggtttattattattcatggtaatttaaattgattaaagacaaaaaattttaaaataaagaattctaaataatttagtaattaaatatttctatataagtatatagtattctaatattttttatattgtgtatttttattatttatttaatttccaaatagcttgtacagcacaaatagatttgctcattcctaataaaccatcaatatcttcttttaattttaaatagtttagattattcaatacaattatgcaatctaatagttcctatatagacattttaatacatgtatatttttgctacatgttttggcaatttttaataaagagattgtgattaggaaatttacttctgtataaatcaattgatcatggtttaaaggatataaggtctttaaatcttttctaattaagaaaaattgtaattgtgaagatttgatgctagtttaattcaaagatcataataaaaggtttgacacatgtcttaaaaacagttacaatctttctttacctgtatttactgaaaagttaactagacaaatgtatttattcccacattccttaattattttctttctgtcctctgtatatacaaatacatccatagggaacacataatacatacatatatacatggatgtacactaattaaataccactgtatcttgctaagtcaaataactatatatatgtatacttgtgttaatatggtcactgttattaactcgcttaaacttatggttatacttctatttctttcttttttgtaatataatattcaattgtacgtaagctaacatatccaataactattgtactcacatgaacagtagagacatactatagaattactctaacaatatttgaagaaatggagattccttttaggtagcaaaggaaaaaagggaaagaaagagaaataacatgctatttcccaaatgcagagaattgcacactgatgatatattatacttactctacatattaagaatataatacacaaaaatgtagatacacagaatttcgtaatgtaccttattttgaaaacatatgatatctcttcttgtcttttactgggtgtagaactttcaagatttacaagatacaggagaatgtcccctctatatgtgaaaaatattgtaataataataataataataataataataatccaaggattccgataatgtgaaaattttctttttaaataaggaacatgtaaaactatcataacacagtcgtatttttgcaaatgttaattcatagatatattatgtcttgttattttaatgttataatgcaattaaactcttattacttttttttgaatttcaatatcttctcatgactcttggttacaattagagatccatacacagtattaaacatccagctataataatgtcagattaactcttaaaaagagtaaatttcctgaatattaaattgataaattttcatgttaatattccaccacagtatattcttaaatgttgttcaatgttcaaagattaagataaaatttctctctattatattatcttgtcaaacattaaaataagatcatctgaataaaagacacaacaaaaattattgaacagggaaagtagcaccgtagaatggaataaagatataatcaaactattattcattatattaaatcaatgtatcttttatcatcattaccataagcattggaaatcaaacataaatcaaatacatctataataagattggaattagtaaggataaatatcctgtaagatatgaataaaaagattatacagtaaatttatttattgatatagcataattgtatctatgtttataacagttatcattatgtgttaatttcaaaagagtattgcatatgatcataaattattataacagtatcattcgatggataatgaagtgatgtggaagatataattatatttttcatattgaaaatattagtaagggatagtgttcatgtaatattggaatatgctttaatagatatatttattatgacagtagtagtataacagtaaatggttatggcctattaataaatgtcttccttagtcacaatctaggtatgaaataagttgttatgagggtattctctatagccagttatgaatgattattaggtgtacaatgatgtaactataccatcttaaatagtggtttggcaatgttcaaagttataccatatagtaagcatatcgtaactgtttatttatggttagatggatctgcattttatatggttgtcaatgagtgtggttattattgtaattgattttttttttttcgaactattttttcaaattttgaaacaaggaaaattgacaattgaaatttga

SEQ ID NO: 14 - DNA, 2776 bp, Kazachstania heterogenica
  source 1..2776: mol_type = genomic DNA
atattcctcgacaaataactgcttatcttgagtttattttttgttccagaatttacaatcaatggtgttaaaaacaaagcatacgagtaataatagaaagccttttttcattattagaaaatattagtaatggaattgacaattgggataaagataaatatatttttaatcaaataaataatattttatttatttcctgttatatgacacattcttatgagatattgcataaattatttctaattttagtactccccatcagagataccgaaaacatattttgaaatatttccttttaacatcagtatcttcacagaaaatttacataacacctgacatcaactgtacttaacaagactcatttatgtatctaaaactactgtattataaataatacgtaacttggcatattaaaccctcttccatatattttattatctatgcagtatataaaaaaacaatattaaatattcattcaattgattaccaatcatagtatatagttcattaaataataaatataaattaacttagtttttttggataaactaaaccaaaaatactatattttctgatatatatatatatttatataattatgttaagttaaattagttgatgaaagatttttttacttcataaatgctacatttttaatattaattattttactccatttaatttatatttcttgaacaagaaaattaagttttaaaacttgataaaatactatgacactacaaataaaacatatcaatgctaaaatagatataaaatcgctcctctaacactgtacgtaacaaaaagattttctccctccttcgaaacttatagtgattaaaatattcttaaaataaattttttttatttgttaactgtagaaagtagaaaaattaatatgcttattactcgcaacttataaactggtatttggatgtttagtttgtaaagaatgtacacaaataatacatacatcaatttaatatgtatgtaaataaatacttttcgatctttaataaattttatttttgaatggttttcttcttgaaacatttttcaatattcttttttacaacttctagaaacaacaaataatattgtaaaaagccctaattgaaaatcctgaaataggtagtcggtgaataacatcgaatgtcgaggagaaagacttgaaacagtcaaaactctggacctaagattgtgagtgtattcgaacgaacaaacaatcgttggatgaacattggtggcaaattattgagaagcttatttaaaaaacctctgattattgagagatagtatcagaaataattatcagcataaacattcgtattctatctaataggttctgtctagaagaatagctagaatagtgataataacctaaataataagactaatttatttattagttagaatcaaccaattatataatgtgcaagtgtttgtatatatgattaatatccatattttagtatactacttaagataatcccttacataattagctttatttattataactgaaagttttcaggtaattttgagacattcattttagatatttttttgtaactcctaattacgtacattaggaagcttgtaaatttcagtacattagaaaaatctgaagaatctgcaatgaattaaaaaaatttaagtatactattataataaacaaatataatggctagattatatagttaatatataaataatatatatattctattttcggcataactatttattatattgtcttgttcttctggtaggagcttgcaacaaactgtattttttcacagatcaatacattaaaaataatcacctctcgagtagcaaccgtaatatatattgttctaataccattatggataattttatagactctttagtcgacgaggtcgttaatgcttttaatatttataaacattacatctatttctccatgcatttctctaggctgttcctggtatagagtgtagtttgtatataatatacggagaataactatcgagaattatctatcatattctatcttctaaaagaatatatctgtaatacttcagataccaatgtgtcagctagggttctgactgtcagattagaaaaataagggtcacagatattcaataaactccgctttttagaacatattacaaacaaaccttgttagtgaaaatatgagaagttataaagagaagatacaaatacatagagtaaaaataatcaacagaatgcaaaaagaagatgcacacgaataaacaaaaaataataagcaagtgtattgtttatattacttacttatattaatatagctaatatattattatatccagaaataaaatgtgaatcaatatttcatatttacttgggtgaactcttataatatattgtttacaagttggttgtaattagaggctcataaccaaatgattattccataatgcgaatttttcttaaattgtaaaacgatacaaacaatttaacaaatcacttgatatatgcaccttttgtgacatacgaaatcctaatgtctctataaatgagcttgtcaactcttgagtcaacgtttttatttttcttgtttatatatcatatgtagagaagaaatcaagcaatattcatctattacaccttgtaccgacttcgtatcccatgatattttaaattaaatttttctaaaaatgatttcgcccaggatcgaactggggacgttctgcgtgttaagcagatgccataaccaactagaccacgaaaccatgtctccgtcataatc

SEQ ID NO: 15 - DNA, 508779 bp, Kazachstania heterogenica
  source 1..508779: mol_type = genomic DNA
ttatagggggacctcttatttctctttctattccatgccacatcattttgtcttatccttttcttcccaatctttcatctgtttatttcttactttccctcttagatcacttatctatgttctaacacctacataccctccttacctcactacttatcaccctataccaatctatcttttccctgcagatattccatcataatataaatatttacattctctctcatcatattccctatgtttccatacatctcctcatctactctactacttctcttccctcatttacctatttttacaacatctacactcatccctactctcctattctcacacaccaataatctgtaagagttgttgtatgtaaatggatgaatcatatcaattagtataagtataaacactcttactcaagttctgtatattactaattaatgaccctaatgttgtattattccttcttctttttttgtatgatattaaagttgccccttaatattcttactaagatgtatttaaataagatgattacccctgacatatctctcaataatcaaaggcctcttaacaaaatctgatataactatcactctctggaaatcctccaatagacaaacttacaatattagccataagaagaattcttacatccttcaattccaaatatacaagggaaaataatgctttatatttgttattcactacatatttaaagatattaaaaactttaaattattattttaatagaatctttggtccttctgttattgacattaataaagagatcacttaaaagctatcacaacatagttgtgactgtcttaccagtatcaacaatgattagtaattcattatttttcctaggtcttgtttttactaaagcttataatataacatcacaaccctcttaatatatgtcttttacattcctcgttcttaatcctatttctatatatcaagtataaagaaaaactaagcaaaaaaagaaaactaacgccataaatagtatcttaaactaatctgtttttttcttgattgttaactatataaagcgattcataccatgcaaagaacacaacagctgaaaaattgcacatgatataaaactcaaaacatagtcgtttagaacatgatgtatatatattttgaaatctgaagttcattttttttacaatgactccaaaaatcaaattaacattgttaaatcttatgtacgtcgtctcagttggaattacataagaagtattgaatatataaagataaacaatgttaattctgctgttaactattctcttgtgactgcgcacaaatattgttctatctttttattttaagaatgaaaaaatttaattaggcttacagaaaaagcaagtagataaagaagacaggccattattaagttatcttgacaacatctgctacttttgagatatgaagttgccgaaccgttttctacaaaccctgcctctaaacaaagacgaaagctagaaaaacccagaatattatttcatgcccgatttttatcatgttagtacgatatagatatatatgtctctttgtgttctatttttaaatttttgtccctgaattattttagaaaacccccactcctataattttaaaaacacctcacgttagcacaatcttgtttaatacatatatcggttctatccaaatactacgaagatgcagtagcaattcttactaatcaacactatctgcatgacgaattttcagtaaccaaaacacaacttggcattattgtaattttttggaaaacagaatgaagaatttttatatctccaaaaaagtaacatctatacttgtaatgtgaattcaaattggtggtgctatatcaaaataaaaaaattggaagtattagaaaaaattgattattaaaactacacatttgtgttaatattcccttcatgtagctaacatgtctacacgacatagctggtacaatatagtgttatagatattgtaagactttttagaagcaagatagaaaaaataccatggaacggtgggtttgcttttttttgctttataacaggcaaaaaatgtacacaaaaagacaaacacaacgtttttgaaaattttttctcatctattattgtttatgtttagctaactcaactttttcctttttttcataaaaaaattttttgcttgtgcgttccagtaaaacagaaaaacatgctcttgtcatgtaaacgcatattcagaccaattaccacagaaacctcatttcacttttcaattattctgtagtaacaaaagcaaagaaaatttttggcaaaagtaaaaatacttaattccaatttctaaccggttaaattttgtctacatttggacaaatttttatctgattgtttaacttttttagggtaaaaaaccacaacaagtttgattgttcaactcttcttctagcaaacgagggtttgaacatagttttgcaactcgacaaagaaactaactttctgcttgaacttacatcaagatgaataaattatgttttcctgtttctaatatgaatatagtaagtaagtagaaaaaacaagttattatcttctttaagaaggctattcttcagtatttatctaatttatagtatttatttgttggaatgtacaattccacaagcaaaataaccaacaaagtttatttctttttttagttagcaaccgtcctagagtgattgttgttattttttgtccaaaggacttgtgttaggttttatttttaaattgtaagtcaattctttacaaaagccatagaactttagggttgtttttaaattgtcatttttagacatatcacgaaacttaggaataaaaatacctcatttcagttactaacagaaatattcctaaatactagtacaagaagatgctttggacaacaataaatcccataatctaaaaataaaaaacatgcttaaaaatagttcattgtatactatctattatagtcatttcattcaaccaccaattggcaaacaaaaaacaaaaagaaatactctgttatcaagtcttgctactttaaaaagatacaaactttctatcatcctttgacctagtataaataaacaacatcataacaataggtcaaatataataataatcatcttttttcttgtttgtcttaaaattaaaccaaatatctatcattaaacgacattgtaaaagattttaaggattccacaaggtatacgtcattttttctagttcaatagtactcctgcatgtcttagatattgtgtatccgaaaagaagaaaaaacactccacttaaatggggaattttgaattttacaagttttattgttcttatactagatcggaaaaaagagaaaaaaagcagaaataggaatatcacactaaaaagtctaattgagatctaaatctgccaggagaataatcatattttagatctctatcataatagatgttctaatagaacaataataactttaaataataaattcttggttaacaaaagaacaattttactacatgctaacgtcatataaggtgctgatccttgcaatacgaactaaaaaaagaaaaaaaattgttgatggttcttatagtatataactttatataacttatgtataaacagtaacaatgcaataaaaattctttaccccttttttaaattatacattcctattcgatcccacggtcactgccaaaaattttaatattctattgtgaatgaagtaataaattttgaacattctatagatcgatttactatagaatattgtgatatgtataaaagaaatatagacaccaaataactaactaatcaggggcgatgatcctgtaagagtggggattctctaaaataattcaggggcaaaaatttaaaaatagaatacaaagagacatgtatatctatagtgtggttagaattgtctgtattgtctcttttcccacttgtgtaatttttttcttcacttttattctttttgtcgttgcatcaaatacaaagacgagtgtttccaacacaacagcaaaaaggaaaaaaaactatttgtccattcttaaatttgtaaactttcccttttatgttcttcaaaagtaaagtatctagacaaaactaattctattgtcctgcaatgtgaaaatgtctaaacaataaacaatatttttaattctatatttggaaatgtttttgaggactcaacattttctgtttcctttttcgtttaaagaaatcactacacagtgatatttttttcctattagaaataacagaatgattgactatgctgtgtttctaggttttacttagatttttagtccaattgttgaagattacagatctttttcttcattctttgtttctactcctttacacacttttattattgaagatttattgcaaaactttatttatatcttattcttgttcagtcaaaaaaacagaacctattagacaatcatttttattgtaagtcatgagcacatttttatataaaactactatggattatgtctgaatattctttcgtttcttgcttctcttcttgcaggcatgagcatcatctcgttatacttctagatgctaccagtataaccgaactaagtacatcacctcaaataaccaaaaaaactaacgccataaaatatacacaccaaactatatattttactgaaaagtcaataattctgaatatttgaaaataatataatggtctcaagtgccttaccattgtgcgcggcactgcttttagctgctttttctgctgtatcgaaggcacaagtatcttatgctgttactacttatactgcaccagtttctggttattggaatccggctactattgaaggtgagggtcctattgtaacagtggacagaataatttttaataatccgtataatgcatctaatgatgctaagtgtttgttgacaccagaacaaaaggcggctgttttggacctaatgaataagtacagatctatgtttgttgacactcctaatttgacctggtctgatgctttagccaaacgggctgcgtggtgggcttgcaaatttgatgtatacaaggacattccagaagaccctccagattacgactacaatattggtaaaagcatgtacgcaggagctgctgctaatccagtcggtgctgtagacatgtggtttgatgaaattaatagttataattacagccatcctggcttttcctggccaactgtacattttacacagcttgtttggagatccaccacagaggttggttgtgctgcaaatttattttggcccgcttttgacggttcgcccaatcaatactttgttgtgtgtcagtacttacctgctggtaatatgtttggtcaattccctgaaaatgttatgcctctgaaaccagcttataaaagtcttcattggtcaacaattcattcggcaaccgcccccataaattggacatctatgtctctatatcaaaaaacacatactgtagctccaattactataactccgacatcaaatcctaaccctgtttacacaataccttttggagattggtcaaacttttttccatcaacagcccagataacttatataagtgccactgacagctcaaccaccactgcaacaacaactgcttcgaaaaacggtcatagttctggtatcgatgctactgaaagatcaaccactacttctaaaaaatctgcctctagcaacagtcataattctgctattgatgctattaacagatcaaccatcacttctaaaaaatctacctcgagtaacagtcatagttctgctattgataccactgacagatcaatcatcacttccaagaaatctacttcaagtaacagtcatagttctactatggatgctactaacagatcaactaccacttctaaaaaatctacctcaatcagtcatggttctgctatggatgctactgacagatcaatcaccacttctaagaaatctgtctcaatcagtcatagttctgctatagataccactgacagatcagctactactgcaacaacatctaccccaagcaacagtaatggatctggtattgatgctattaacagattaaccactacttctaacaaatctacttcaagcaacagtcgtggttctgctatggatgctactgatagatcaaccactacttctaacaaatctaccccaagcaacagtaatggttctgctgttgatgctactagcagatcaaccatcacttctgagaaatctgcctcaaacagtcatagttctgctatggataccactgacagatcaaccatcacttctaaaaactctgcctcaatcagtcatagttctactattgatgctactgacagatcaacctccacttctaaaaaatctacctcaatcagtcatggttctactattgatgctactgacaaatcaactaccactgcaacaacatctgcctctagcaacagtcatggttctactatggatgctactgacagatccactgctacttctaacaaatccacctcaagcaacagtcgtggttctactatgaataccactgacagatcaactaccacttctaacaaatctacttcaagtaacagtaatggttctactatggatgctactgacagatcaaccatcacttctagtaaatctacctctagcaacattcatggttctagtgtcgatgccaccaacaagtcaactgccacttctaagaaatctgcctcaaacagtcatagttctactatggatgctactaacagatcaactgccactactaacaaatctacctcaagcaacaatcatagttctgttgttgatgctactgacagatcagctactactgcaacaacatctaccccaagcagcagtcgtggttctgctattgatgccactgacagatcaaccaccatttctaacaaatctacctcaaacagtcatggttcggctatgaataccactgacagatcaatcatcacctctaataaatctaccttgagcaacaatcatagttctgttgttgatgttactgacagatcaaccaccactgcaacaacatctactgaatatactaaatatgcattgactccagaagaacaggctgctgttgttctcgcacacgataagttgagagctttgcatgtcgatactggtaatttgacctggtctaatactttagctgtatatgctgagaagtatgctgccgtttatgattgttcatctggtagacttgtgcactctcatggtccatacggtgaaaaccttgccctgggatttcctaatgcagtcgctgctgtgtacgcctggtataatgaaattgcccattataattacagccatcctggcttttccatggcaactggacattttacacaggttgtttggagatccaccaaggaggttggttgtgctgtaaaatattgtggcccctattatcgtgattatgttgtttgtgagtacgcacctcctggtaattatgaaggtgaattccctgaaaatgtcatgcctttgaaagcatctgtttcaagtagtacttccaggaaacctaagtcatcctctaccccttctgctacttcgaagaaatctacctcaatcagtcatagttctgctatggatgtcactgacagatcaactaccacttttaacaaatctacttcaagcaacagtcatggttctgttgttgatgctactaacagatcaaccttcacttctaagaaatctacttcaaacattcatggttctactatggatgctactgacagatcaaccaccacttctaacaaatctacctcaatcagtcatggttctgttattgatgctactgacagatcaatcatcacttccaagaaatctacctctagcaacagttgtggttctgctatggatgctactcacagatcaaccatcacttctaagaaatctacttcaagcaacaatcgtagttctagtatcaatgttactcacagatcaacctccacttctgaaaaagctgcctctagcaatagtcatggttctactatggatgctactaacagatcaaccatcacttctgaaaaatctactccaagcaacagtcatggttctactatggatgctactgatagatcaaccatcacttctaagaaatctacttcaaacagtaatggttctgctatggatgctactgacagatcaactaccacttctaacaaatttacctcaaacaacagtcatggttctagtatagatgccactgacagatcaaccatcacttctaagaaatctacttcaaacagtaatggttctgctatagatgctacggacagatcaaccactacttctaaaaaatctgcctctagcaacagtcataattctgctattgatgctattaacagatcaaccatcacttctaaaaaatctacctcgagtaacagtcatagttctactatgaatactactgacagatccactgctacttctgacaaatctatctcaatcagtcatggttctactattgatgctattcacagatcaatcaccacttctaagaaatctgcctcaaacagtcatggttctactatggatgctactgatagatcaaccaccactgtaacaacatctacctctagcaacagtaatggttctactattgatgctactgacagatcaacctccacttctgaaaaatctactccaagtaacagtcatggttctgctatgaatactactgacagatcaactaccactgcaacaacatctacctcgagcaacagtcgtggttctgctattgatgctacttacagatcaatcatcacttctaaaaaatctacctcaagcaacagtcgtggttctgctattgatgctactcacagatcaaccatcatttctaagaaatctacttcaaacagtcatggttctgctatagatgccactgacagatcagctactactgcaacaacatctaccccaagcaacagtaatggttctgctatgaatactactgacagatcaaccaccatttctaaaaaatctacctcaatcagtcatggttctgctatagatgccactgacagatcagctactactgcaacaacatctaccccaagcaacagtaatggttctgctattggtgccagtagtaagacacatgctgctggtgaagctgcatctgctaaaacaaatgttgctcactccgtcacaaccgctactgttgagagcacacacacggtagatgtcactgaatgtccaatttgctcactatccaccgctaccacttcattttcttcccaaaacagtcaaactgtcctacatggtgaaccagtgttgagagttagtacagtttatactacagacggtgttgttatcactacatacactccttcatgtccagaaagtgctaagacaggttctgtttcagcttctgctgctactgctactgcaccttcagacgtaagcatggaatctgcccattccaatgttgttccatctgtaggtgttgctacttcttcttctaattctgcggaaagtgttacagttgcaaaatatgaaggtttggcagctagtttgacctcagatgttctattcagcgctattttaatggctcttattcatttgatctaattatgatactgttttagagaggcatttgaacctgtactaataattgacagacgctgtaatatatcatttattgtgattgtctgatgttagtataaaaaaattacagcacccgttgattattagtacaagtacaaatgcctcttttttttatactaaccttgattttatttatttactttttgtataaaatattttttttaaatataatttatttacagaacacttttagttggtctaatttatttttacctaaaaatattgaatcttgtcctactactacgagcatgaccttagtagtctacttcattctcatcaccatgacgctttcctttctttacctaaaaagcatgactacaggggttgtataagttattgaccttcttaaatacaactttatgcgtctcaaggacgatatttttttcatttcagttgtgaagaatacgtcactatctatatggaatccttcaatgctatcgtagagaccaaatatctgaagatcctactgaaatatatcaatgatcatatttgatactctaaagagacaatataaaacaatcaaactactccaatagatgtaaaagtgaaaagatctgtatctttgaatcaaatactgaatgggaaccctatatctaagagaactaagctgaatgggagtaaaataaaaggaatatcgaaagacccagagactgtcgaccttgtggaactacctgagcaggtagacctcgataacgttcaaacaaataaaccaaaaaatattcctgttggtgttaatgtatccaacgtctcggtgaagacatttctaatgaggaaaccaccaaagtttgataggcaaactaaaatagaaataaaatcttcaaaaacaagtcgatataaaaaagatgtagtacccttagatgatttagaaaatacagctgatgaaggagatcacctgaaaatccaagaagtaatagatttggagaacgaacattttgaaaaattgattaatccaaaaaagttaattcaaccaatatctaacataaagaagaccaacttaaaggaactattagtgaatatgagaaacaataatcttaatactactacaaatacatatgatgacgaatatattacaaagtccttcaggagatacaacagtgtttccaaattagatcatttactaccacctttgtcccatactctgttgactgaaccatttgaatcttttaataatatcacttccaataataatgatattgaactaaaacagttgcacaaaaagaattcaagtgttatttcgtaccaaatgtcattatatatacttgaaatgtttacatctaattatatcttaaaacttaataaaatatacaaaataatagaaatataatatacacccattagtttttaatatttcactttgtattatcttttccaaaaactatgtcattaaatattattcatttgtaagtattaatagtattatgtgaagaatttagatgttgtaatgtataaattatttaaacgcattaataaaggttggatttcatatttatttaatggtgaactaataaattttagaattctatttattatgatatagcaataaatattctagatatatataatattataaccataggtaagaaaagtctatctgttattttatttgtaaaataatatccactagcttttgccttattttctttttatttaattattagtatacttatcaaaactgttgaataataggcagataatcactacttttttatttaaaagtgatttttgtagatcattaaaacaactttttgaagaaaatatttcaagaaaaagaaatagtgaaggatcaatgtgtgtttgtttataaacaccatatatattttctgcatagtttttaataaaatggagatccaatttgtctaaggctcaagtaatagaaatgttagatataaaattcattattgtctaagataaaccaactatcttcaatactactgtgctaatcatcaattctatcatatgtgttaaaatataactccacataagttattgtctctatggaacctgatttaagtttaacttgctaaagttagcatcaatacaacactgccaatctttatcatttatcaaaatatttcagttgcaatagatgctaaagcctagaaattatttgcattcacttatttggcatttttaactataataacgtagtcgaatttaagattgcataatttcatggtaaatagtagttttgttttcgaatcttgcaatttcctttttgacatttatgcaactggcacaaatatgttgttttagactacttttgtgcatgacatcttgcctgttgttgtttggaacaaacattgagaaattttcctttaaacgaccacataatagcaaaataaaaattggttgagggcaaaacagaaatatctcactcacatgaaactttctacttgctttcatcgtaaaatgggctaatagatgtttccaaacaagcagaggtaattataatactataaacgttttaattatgaattttaattgtgatttgacatcaagggggaatatgctatagctattgtttcaataattcatggtatttattgtttttgtttcaaatggattggaaaattctagtgaataccaagtttgtaatttctttgaaaactaatatggtgttgttgagaagaatagccagtcaatacgtaagctaaagttttttaagacgatccatagtagataaagctgtttatgttaaatgttttattttcactttgaaagaaatgcattttttcattacttcagcgcaagaaaaacagttttttttttctgttgtttttgatcagaaaaatttggacattcatttttttaatcgtattagatgttgatgttattgcatcaatgtttttatgtagtattaggaagtgaatcatttcttctagtttggaatgtatgcaatccgcaacctataagaagtagttgattcattattgtataaatatttattatagttaacagaaataatgcccaaaacatactcattatgatatatacaaaatcttttgacccataagaatttagtataacaagagattgtcgtatcctgtattatataaaaaaatgaagttcatagaaatgaaattgtaagttcaaattgatttatcccaagcatatttctaattagtattcaattaatagggaaaattgatacagtcatttatgagattcttttatattattacagttgaatatcagatatccagagatctttaaaaaaacaaaaaacacttctaacagatataagtaaacatcttttatattatgttataaagcatattgtcctaagaacatattttaattcattgaagagcaaaagctctaattctaatgataataagaaaatgtttatataactacgaaaccatcaaaattttcatgctttataaatttgaggaggtattagaagtattgttttagaaacatagtgaaaagcaaaaattaattacggtacagtatcttggagagacatagtaacgacattaatatcggtgagtatatttattcttttagaggcaaaaagaaaattaaaacaattcaagtgtatattgctattgttattttaggaatactaaaaagatttaatagatttataacaaatcacaaaactgaataatactcagataaatgtaagttagctatatcttgaattgaatttggtgcttttacgtataatagagatgttttaataattactagcgactaaggatatttatttattagagtccttttcaagttttaattgccaagtatactaaggttaatttacacttaacagagatataggacatcaatattccttaaatttggtaattttcaaaattcaaactaaaaatgttgttcctttcgtttaattgcttatttttaataacaaattttcatattgtagtatccaaattaccataaaatatttgtagttttatgttacaattgtaaaatttagtaagctatcatcttcaatatatggctcaaaagagattttatctttcaaatttattgttaaaaccactcttttgtccaagtgttaatttagcagtgaagactactcgctgtaacttgtgtttattctgtatttgaatgattattcatgtgtaatattagaaatctctactactttattgataatatcgccccattagtataaaatttatcttgaaaaaagttttgttgtgttttttattgcatataatgcctaagtgtatcactgactatttaaagacaatatcatattaatataattaatgataatatttgaaaatctaaaaaatatgagatggtctatatttacacagatatatttgacatatttgttgtatgtttgattgagtttctttatattattcataatgactgtgttttctaaggattttgacaaatccagaagattttagaatgatttattgaaaagcagaagcatgactactattattacaacagtcccatataacctgttttgatttatatgaaagaaaatcgaagacaggtatccttggaaaacgaagtgatttgtagtaattgttggatgtctgtttcaaaaatataataatagaaaacactctatcattaaaacagatttggctagcaggggtcttaacaaaagtaattaattaggaagttttctgagatatttatttatgtttatttggtgttttattatctaacccatgtgaaattcaagattgaaaggactaatctctgtctcttcaaaagaaaaatggttacctacaacaggattccagtggttgtgtaatttatggattttacatgtcccattaaagattttgctttcttttacaagtcgaaaaaaatttttttctctgactgcagatatttttcgtgagatttagctcgaaagccgttgacaatagagtaaaaattattatgacaaaaacactacggctttatcctaaaaagggaaatgtccattaaaaaaagcttagattttgttttgtttttccgaattcagtggatagaatttcctcgagatcgcattgttattcaaagttgcaaatatttgaaaaaagaagaactgttaaaaggagtcctaattgaggaagatagactaggtacgtaagtcttcctccttgttgtagcgtgtaacaatcctgtttaaggctagatggtagagttaacattacagaaaaaactcatccagtctttcgatacttcagtgtgtaggatagacacttttatagagggtttccagtacattttatggaaagtataaaatagaaatgagaagtattatgattaaaaaataatatgttttaaaatataagaatttgcaggtagtagatgtttatagtatgctatgtgaagtattcttttgagtgtatctttaaaatgattttaaaagaagagtactctgaactatatattggttaaaactaatataaacaagtggattttgttttatttttattggacagttgtatataaaaacaaaagaaaatataatatttttgttaggctgtagtatttttaccccttagatggttataggcagtagtgtataaggtggatgaaggtggggtgacaatatcaacaacttctgaagacgaagaactgtcaccgttaacaagggtgatggtgtaggtggtgtcatattttaatcgatcttgtgacatagaagcaaatctggtctgacattactaaaattataaacaccagtctaaattaaagatttaaatagtgtattgtgaaaagttgtcttaatcttgagtctaactattgaagaaaaataaaataaatgatatttatagaataccgtattttttttaagaaatgtatcaactgtttcgtgcattctattcttattatcgtttttttgagtttttttaccaaatttaacctggtgagtgtatgatggtcgttatactcttcaatttttaggatagaaaaattattaaataaatcttaactagtattttagaagctgattcaagataattcgataggtattactaaaaatcaaactgttggtattgttatgatataggctagtaaaaaaatatatatatagatgagaaaaattatttgtctcgaagatggaattttatattaggatcaagataagaaaacaaagtaataatttcacaaattctttttataggttgtaaataattatttcttataaatattgttcatgatactctcagtttttttctattatataagaaggtaaaaaaatatacttgcaatttatgtatgaagggttatactaattaatcatggttatgatttttagtagcatcttaagtgcagatgctaatgctagaatttttcactatcttaatttttgatttcttaatttgagttcttcacaatggttagttgtattaaatttcgtaagaagctctatttggaatactgaaatgcgcagtctacaggtaacaccctatattaaggggaaagacttggggtagccaaaactttgaagccaagtcataagtatattcgaacaaatgatcgtcaaattaacgttggtggcagattactgaaaatttcatttaagaaatctctgattgttgagagaatgtgccagaggtaattattagttttaaggttggtattctatcttctaaggtttgcccagaaaataaaataacttaagatcagttcaggtattcaagatcagccaaaaataatgagtttattagtttagaattgaccattatgtgatttgtaaacgtttatagatataattaatatctatatttttgtatattatttataagaatccttacaaatttttgtctggacttttttaatgattttcaaaaaatttgtataagaatgaaattaataactatacttaaatattatatatgcaaaaaacaaacaaaaaaaggaaggaaaagaaaaaatcaaatatagaacgacacataaatattaagagatgatagattcttataaaaattgtacaaagcagccgccaactatatattaatattgcttcatagatgttgacgcaaggcttcggaatcaaaaattctagtagagttcattttagactaatataataaaaaaatataacttacaataggatattggtggtattataagttttattgatatttatagttgaaagctagcaatactataaattgttattgtattgcttggtcgtttctttctacataactaatatacaagatacaatattatacagtatactccttttatcttcgaatcttctttaatataaatttttataacttacatggatgtattaatttttattgtagcaatgttaatggacattatttactctactcatatcccaatcatctgataactttgttactctttgttagacatagcagcataaatctcgaaataaattacaaccttaaacattttgtataataaataatataaataaactctgaatatgtataataacttattaattagtatactaggactgttttgttatctactctaaaatgtgtgctatcttggatcttaactgtaatattaccaatatgaatataagtattagaacaagaacataactaacatgtttcaaactatctaatctgttataaatgatctaacaactcttccaataatgtatctataattatattctacattataaacatcacactagtagattattaattgtattaatttaatagaattatttgtgctactataattcgttatattaaaatgatctctttgattatcccaatactaatacaacactatgacaatgagatagaaaaagatgataatctatatgaacaataaataaacccgctactattacttactgaagatatttttgatgttatcaatattattaattattcatatctcaaccaagaaagctatcattatttagaatgcttttatactcttaatagaaatttatatattaatatgtttgtttgatcatcaggcaacatatccaaaattatcattacaactatcctaaataacatcttactatctaacaagtcaaacatttctggcttatataatacaccaactcaaacaggtctctatatactatacccctaactctttctcaatctttatctttttcaaattcagtaaattttaattaatcaaagaacatttcaccttttaatcatttcaatacatgctgatgtacaaataaaataacttgattgttaataaatcatgtggtaacagttgtttaatttccaacaggaatggcatctactggtattattataaaccttcataaaaatttaatatgtctccaaatttatttttctttatctaatgatatcatcattgtaaattgcaatagtctaacagcagatgattttgcactaccactaattgaattaagaaagtattgatgttgtacaattcattagagaactaaaccaaaaaggactggaagataattcacgtaactgtattggatatcattcagtatatgttcaaaagttagagagtgaaatcatataaaagcacaataaaaaactttacacctaacccacgtataactcatagcattaatacactatatgacattaatcgttatccacaaaagatagacatttgctgaaagctgctgtttcatagaaaaaaacttcctgtttcattgtattaaatatctcataacatcttgtaaattgattactcaagctaaactaaggttctttgtttgaataagttagataacactgtataaagtaggaaaaatcaacttatcatttgatagtaatactcaaaacgaacactattccacttttctcaattgtatataaatatggtaactcaaataaaataattcctatagatcagcacaaaacctactttctgttgtgtatcccacacttaaaccatttttgtttttaattacaatatatttacaagttcatccatgtgtattatttgatttaatactgttgattgttggatattatgttggtgttgtgagaattgacaacagtgttatggaattttaccacttgacagtcagtaataatgaattgattttcaggaagaaatataatcttagttattggtagggtgtatttttgtgagtgatttggatgtaatatttgtgatgtagttgggtagtagtacgatggtagttggcatagtgttgataattatactgtgaggttcatctatatggataggtttcatggtagtagtattgaagtgatcactatgtgaaattgatatgttatcagattatatcatttagggggaagatactgtaagtgtttgtgtttatgtatttgtaaatactcatagcaatagagcaaccataccataaagatagatgtattttgtttataaatatcttccttagtaataacccatgtacaaagtggattgtcgtgaatatactctctatagttaaggatatcttggttggctgtatcaaatatatttatggcataattatatcatgttggatggtagtatctcaatgttatataatgtgaatttgtgaagtgcatagatctcaactgaggatgtgttttcatctgtaagcaagtctttttaatgttgtttgcatggtgtagtggttgatatctgtttgagttgtttttatttgattgaaaaaagtttttggaatttaagaaaaattggatttcagaaaagaaaaagaatgaaaagataagaagacaattttagcatattttggcagttacagttctgcaagcagtgttatattaactaactagtaggtatagatcaaaaaagtcgtgtaagaatgaataagtggctattctatattgtttgctatggtatggcataatacacaataaaagatagtattgtgcaaagtgatagttgtagtgggtagtgtaatttaataagagctattactaggatatcagtagaagtagatgtattaatgcacatagcacttcaaaatattaaatgtatgatagagagaagagaatataatgtgtaatttaataaattatacaaattactagaaatataagatatattcattatttctttaggtttaattttgtaccatcttgttcactaactgataatatcatcacaaattacatcattaagtactctccatctgttagtcgtaacgaaataatatggaaaattgtatatgttgtgacagttctagtgcttaaacttattaacagtagttgagtttcaacgtgatctaacaatcatgtttactcatacctatcattaacgatctttctttggacaagcatttcaacttacttatttaattaaccctgtgaatacctgttttaaaatgcttagtttctattactgattgtatataataatttatatcttcacaagtattaaacatatcaagaatatttacatgtttattaaaattattataaaaataattatatataaacgtatgttgtatttaatgataatatatactttatgttaatgaatcatagaaatccatataaagggcctatcaaaataataacaaggtcaattatattatacattttcttaatcattaagtaaaacggacaagtcactttatatgaggtataaatagtgagatgatggtgtgtaaaagatagttcatttttctctattatttagtttcttcatgaaattctagcattagaattattctctatatggaatagtaataattaaatcaaaccctaactagctaaaatacaactgtgttaggattgaataatattctctgcacgtcttctctttaattattatatatatattatcgaatcaacttgcttcagacttaaaagttgttagcttacctggtagtttatcccctaattcctatttataataatcaactctatgtatatatatatcttttatatattgtaataaatattcaatgggatattaatcaatatacttattatatgttcgtttgtattaatatataccactattatatttgtcagctgtcttatatcttaatgtttttcaatacaatataagtatggtatctaagaaggtatgcaacccactcagctcaataaaaataacacacaatatttcaaatagttcatgtggcacatacttgtgaatatttcaactagttctattacaatatggtcatctagtacaactttgctttttgattggttgaactagtaagaaccctatatagtgtccatcaaatggaatatgcaattaggaacatcacattagttacttcttgtatagttgttatgcaatatcataaaaatacagtctctaggaatagtatttatatgacttaacctaactacaataaaatatatttattaaatatcgttgcttgtatttgttcaaattgtatgcacattagtcattactccgggttattcttcaatccttggatgattgatattctaatatacttttaaattggcagtgtcattcttgaagtgttataattagtgttcttgtatactcgttctttctagtgtatagtaaataaacagaaaatattttcaaaaggctagtgggaaagtatagagtaaatcacactggagaaatctagcagatataacatgaaatatattctaatcgtggcattcattgtttaaactagttacttaacactcacaaagaaatatactagtcaaaacacagttacgtgctttgtattttttaaaatttttaaatattttttctcgatgtcatcacagaatttttttgctgcagcagtttttccatcaacgatgagatgaaaagtagattaagagaagaaaagagtacttgtagtaattatctttaaatagtgatgttggaactttcattagatagaaaacaagatttcaatatgcagtggtatattttatttctaacatgaattggtatatattcatagtgtgataatatatgatgtgtttttaaaatatcaatataccttcttagatattatcatagttcaactattaaataaaatacattagcatttcaagttttctggatagaagtttatctaaagtgttctttgctacgctagtttattaaactttcattatgttagtatatatggatcatttattaatgttcagttaaagcattgtggttttataactccattatttgttattgaatgttaataatttctgtgttatactgttacttttattatgttattaaaagagggtattatagaattaaaaaaaaaaaaaaacaatgtgatttcaacggatgacaaacaggaacatgctaaagaattgttgtttatgtgtcattcaatatcagtgaaacagcctaattatttttctattattcatagaagagaagcagcgagatttaacatgtcaaatggcaacaattttttcatgtcatgtttctctctttggatactttttgtacattgtattatttgtagagaggaagatcgaagaactcaaacagaattctgtacactatacatatgtaactacaataattgagaatgtatactacatattaaatgactacagatactaatttgcaaccgaaacagatatattctaattttattaaaagaaaataacttgcaaaatatatattttttgagtgaagaagctatttattactcaaaatataagtccaaaaatattcgaagggtttctctgttttaatgcctacactttcataaaaagaggcagtataactaaaggaaaaagatttaaagcgcctttagatcagcatttagcttatattgaataaaacaaattgcaaataacaataaatgcccttcttatagtacttaatttagaaagaactttggaatacaagaaaaaaatattatcactttataaaaatggttacactattatattatcttccatacattcaatttggtaaatattgttcaaagagttcttcaattatcaatattcatagctcacaataaatacacattctttcaagcaataatgtcatatattagatggtaaatacacatggagtttcttagcatagcaaaatgtatattcttacttaaaacttattactattcctagaaattatcatttttgttgttttccttctcagttcttatgtttaattttatttgttgaatttttcatttgttaattgtagcagccacaaatcaacaaaacgatccatatatataataacaatgtagtctgtcggatatacttaaaatacaaaaatagcaatatctttataaacgataatgtaatcatagcatgcaaagaacaatattttctttcatgcctgctctctaaaacctttttttcactacttttttaaaaaaaaaaaaattttttattcaagatataaaaaaaaaaaaaagagtttggattgtttttccatccatgctattgttattcttattgttgtaatggtttattcggaaaaacagatagaactgttactcatcaatgtaaacaaattacatccattagattaacaatcttattcactttcgtttggtaaccattgatttctttctatacgaattagtagtggatgaaatacaagtgggggaatgacaataacacgaaatgttaaatgctttcaagtaaggaaatatatttatttatataggactaataatacgttattttgttttcttgacgtctcagatgttattgtcattaatgcatgtgctaaaatgaagtgaaaaaaaaatttaaacgagaattgttattattcaaatatcttaatacataaaagaatacttcgatggttaacaatcactttcagtagggaaaaaaggtgcgttatttacagcactaaattgatttttttaatttttcactaaaaataaactaaaataaactgtaaacaaaaatagacgagcaaacccgtataacagtatgacaatatgaataagattttttgaagaagttcaaaatatttattatctttatgacattttatttttagtcgtaaaagatgttttgcatttttgaaaaatcccattattttgctactgataaataattaatgtcgatgcttcttacatttggtgatattctactttgatttattgaacaaataaagtagtaaatacattcaattgtgcgttttagtacgtaatttctcgtatcatactaataataatactaacggtaaaatatttagttttttattcgatcaattgttcatgttttatgaagacatgtttaggacaaaaaaaaacagatacgatgtaattgtcaatggtaactcttaaatttttaatccaaatttctcatatagcaaatataagcatatatatgaataaggtggatgtttcgaaggtttatttttttcattggcatatatttgcttttgcaattttgaaaacataagatattcatacatctttattggaacataagagggtgacaaaccaaccataatgaaagtgatacatttttttaaatgtgttctggtatttcttaagtttctattgacttttgcagatgctatcacaatttctacttacacttatttaaataataatgatctctctaatgatatcaccattaatcaagattactttttagcgttagtcaatgggaacactgaagatttccagcataacttagtggtgaaaggttcgcttttcattggtgataaaaatccagctgatagtggattcactactacattcactggttcaactctagaaaacgacggtttgattgtagttgatggtaggaatctttcatctggttcaatgactgtgtcatggagtggttcttcaattactaataatggaaaaatgtatttcaatggtttaaatagtgattcgaatagttttacattggatccgagttcatctttgataaataatggtttgatgtattttagtcaagatagttcttctggttatagtggctccgtgcagctcaaatcaaattctttcactaatgatggtaccatttgtttgaaaaatgtgaaagcatatttagagagttctatatcaggtaatggttgtattacgataggtgaaaatacagtatatgctattcaatctgatagtgaaggcacacttggttcacagactttatatatgacttctccttcttcgatgatctatgtggactcatatggtgtaacaaataatatccatgttagaggtttcggtaatggtaattatttgacatttggtacttcaatagttagacattcttataattcagacactggtgtattatattttagtgtctttttattcattagtcataaaattaatatcggtactggttatgataatgacggattttcaatgacaactataagtaaccatattggttcaaggttactgaacaacgctttagtgtatagtggttctgacccaaatggtaagcctagcgcttgtatggcatgtgattcatcttcttggatacctgttattagtattccttcttctagttcattgcctacattgtcaagtgtcttttctagttcttctattatttcgacattatctactgtaaattcctctggctttatttcttcttcttcatcagcaaatttttctccatacccatcctcttctttttcatcttctactacgtcaactacagctattgtggcatcatttagtacaccatctttttttgtttcaactgttgatatttcctcatcatctgatagtaggatgtcgtctcttttatcctctagtacttctactacatcatccatttctccaaacaagtccaccacttctgatcttttaacggcatcgttaatgtcaaaagcaacaacgtctcaagacatatcgtccgaatcttcttcttttgcaaataatactacaagtataaatcactctgcagtattaccatcttctacttctatcagatcatcattcatcagttcttctatgtcaatggatcatacaagcactatggaatcaagggtcaaaactagttctacagctacaccagtttctagtatgcctttttcacattctcaactccaagactctagtattgtaagttcagtatttttatcttctgcacaaagcacaacttttatcttggcttcttcttccatcacacctgctttaaaatcatcaaatatttataacacaggctcaaaagcatctattgaccctatttctagaacgcatagttcatcaattgaaaattcaaacaaagtggattcaactacaactttctctactacaataaagacttcttccctttccagctttatgtcagatggacatacagctgcaccaataacgaaaaaagacagttcttctgttgcatcttcattgccagttttctcaagtatgtctagtcaatcaagatctactattttatttaattcttcatctttatggaacaaagtttcctcagatggtatgagtactagttcttcaagtctagcagcaacatctacttctaaggaaacacattctgtcgagtatagtggagcatcttctactagcatgactagtatattttcatcggttttgtcttccattaaaagttcttctaagagtgagtctgttgcaaaactccagtctacaagttcgtcaactgtagactcatttagtgtaccttccttttttgtttcaactgttgatatttcctcatcatctgatagtaggatgtcgtctcttttatcctctagtacttctactacatcatccatttctccaaacaagtccaccacttctgatcttttaacggcatcgttaatgtcaaaagcaacaacgtctcaagacatatcgtccgaatcttcttcttttgcaaataatactacaagtataaatcactctgcagtattaccatcttctacttctatcagatcatcattcatcagttcttctatgtcaatggatcatacaagcactatggaatcaagggccaagactaattctacaactacaccggtttctagtatattttcttcacattctaccttaacaattagctcattgtttacttcaacagcaaaaacttcacattctcaacttcaaagctctagtattgtaagttcaatatccttatcttctatccaaagcggtgctgctattttgacttctgcttctagcacacttgttctaagctcatcaaatatttataacacaagctcaaaaacccatatctcgttatccttgacttccagttccttttcactttcttctttaactaatgacttagtatcctctcataagtcaaaagctctatcttccactataaaggattcagataaaaattttacatttacttctatcgatccaatgtcaagaatgcatagttcaccaattgaaagtccaaacaaaatgagttcaactacaactttctctactacaataaagacttcttccctttccagctttatgtcagatggacatacagctgcaccaataacgaaaaaagacagttcttctgttgcatcttcattgccagttttctcaagtatgtctagtcaatcaagatctactattttatttaattcttcatctttatggaacaaagtttcctcagatggtatgagtactagttcttcaagtctagcagcaacatctacttctaaggaaacacattctgtcgagtatagtggagcatcttctactagcatgactagtatattttcatcggttttgtcttccattaaaagttcttctaagagtgagtctgttgcaaaaattcagtctataagtgcatcagctaacaattcaaatatctcaaaagtaaatgtcattagtcattatagcacttatgataccattgtaatgacaactacgacagcatcatgtccatattctgaattggacatgctatccgatactttagttgtattgactacggtagtagttgaaaatgaaagtaaaaaggaatcctcttttatttctttggttcacccatcatgcatggcacatacaacaactttagctaccttatctgagtcttcatataataataaatcatctacattatcaaaggcacagatattcaatcactcattagttgttttacaatcagataacaatggaataatattaactgaaacagatcaacctaaaaagaaaactacacttgcttttacaaggcccatagaatcttcccagtttagacaaaagactcagtcaattggtacagttcatacaacaatgacaataaccgctagcacaaagactatatccttaactgatggtattactgatgttgttagaataaatacagactcggctccacaaaaaattactagctccaagttgatctacacagtgtctacttacatgcttcaagaaaatgctaatagtggttataagtctcaaatgttcaactctctactatcaataattgtattatacattttcatgcttatttagtgatttacagattttatctactcttcctcataaattgtatgtatttttttttgtatatgtgtttattatttaatgtaacaataatttgcgttttaatagaatgacatgatagtggacacctgtagctttaacttatgaacccattagttttgttgtttgtatatcgttcggtttgctttgtttgtacataatatatagatgctgaaattgaatgttcaaaaataaatagataaaccaattcaattttaacaaatattaattgataacaaaaatgtagagaatgtgttgtttgcttatcagttgatgtaaataaacctcatcaacaaagttgtaccacatgtagacgagatgtgccagatatgaaaatatataaaaccaacaattttttcatgtcatatttttttcttagtttatcttttatatattattatacatctatcatatatatagaagaaattagaagaacttaaatataactttgtataccatatctatctaaatataatattgagactgattataatatatctagtcactacaggcactcattcttaacaaagatattttcaatatttactaataaatagttttgctcaattactgtatcgttaatgatgtttgttaaaaaataaatagtatacatattaagtttcttgttaaggattatatggagcaaatcgttaataatttttttgaaagaagtaaagttttgaaagattaatatgtatttaataataaatacaatatatactacttacatgggttttcaataaatgagaaatccaacttactaaatacttaaaacataacaatgttaaaccttaaatctactatagttcagggaatgccgtattagcattcctgaaactctaatttcaaatgttaaatctacaaaattatacttccataaacaattaagattatttaaattaaatatcattttaaatattttcataggataaatgcttgatcataaacagtagaaatatggtatagtgcttaactcaaatttctttatcaagttcttctttgaaatgaaaaacgtaagcagatttttcaaatttgtggctttcactgcatatagaacatgtagattgtttttggatcgatcttgttttctggaagataattttgtattattaggcatagaatatttctcataattctctaaaaactgtccaatatatcttttcccatgagtagagcaaaaattatttcccatgtcaaatgattatatgaacaatttatacttaatccatcaactatattaaattaaacaaaataatgagctctttctaaaaagtttctgaaacatatatatcactatctctttctttaaattacaaaatatgagtgaaccacaattttcgaaagaataaaaataacaacgatagagtcatttgttttatgataaatagatcaataaatttagaccattttcttttcatatgtagaatgtagaaaagatttaaacaacgtaaacttaatacactggattaatctgatccatcaatggttattttatcacatcttatatttgcagctacatttctaggtttactatggtaatatcatctagtaaattttattgctcttttaaacctataacatacaatgttattcacagtatctgctatcatgatattaacatgtatctttactatagatttatacatagtagactaagttcattttaaccactatttctttcaattatgtctttactcttaaactgcttacttcatttggacattaataactggtagattgtatggtatcactcttaaactatgaactcctcattaatatacaacttctcttgatattatgtcttagacaaggacgataccacacaaacatatcacacttaattactcttagcatcagctctcatgatctcttcactatccaccaatctcatttcattcaaatttcaattgtcaattttccttgtttcaaaatctgaaaaaacagttcgaaaaaaaaaatcaattacaataatagccactctcatcgacaaccaagtatataagtaaccaacttcacttataaatagccagttattatctaccttctttacatattcatatgatataatattgaatattatcaaacagttatttaacatggcatagttacaccactgtatacctaataatcatttatatttgactatcagaaataacctcataacgacttactccatgcatagacggtgactatggaagatatttattgataaactatgaccattttttgtgtcactatcacttttattatgaatataactattaaagtatactccaatattacatgaacactatccgttactaatatcttcaatacaaagatataattgtattttctatatcacttcattatccattgaatgatactgttataataatttatgatcacagaaaatagccttttgaaattaacacatcatgataaccgctataaacatagatataattatactatatcaataaagaaattcactgtatgatacttttacttatatctcactggatatttatccttactaattccaatcttattatagatgtatttgatttatgtttgattttcaatgcttatggtaatgatgataaaagacaaattgatttgatataatgaacaatattttgattatatctttattccattctacggtactattttccctgttcaataatttttgttgtgtcttttattcagatgatcttattttaatgtttgaaaaaataatataatagagagaaattttatctcgatccttaaacattgaacaacatttaagaatatactatggtggagtattaacatgttaatctatcaatttaatattcaggaactttattctctttaagagttaatctgatattattatgactggatgtttaatactgtatatggatctctaactgcaacaaagaatgatgagaagttattgaaattcaaaaaaaaataagagtttaattccattataacattaaaataacaagacgtactatatttatgaattaatgtttgtaaaaatatgaatatgttataatattgttacatgtttcttatttaaaaagaaagttcccacattattgaaatcttaggataattattataacgatatttttcaagtgtaggagagaaattctcttgtctcttttgaaactttgaaatctctacatccagtaaaatacaggaagagatgtcatatattcatagaacaataatgtatctatattacaattcatttcatatctgaattctttgtgtatggtgtttctaacatgtacagtaggtatggtatatcatcggtatgcaactttgtatatttgaaaaatatcttgataccacacttccttacagctttttttttgttctaataaaagggatttccatttctttgaatattgttagagtaattttatggtgtctttctactattcatgtgagaataatagttcttaaatacgttatttcatttcgggtcaaatataatgttacaaaaatagaagtagaagtagaaccgctagtcaaaaatgaaagtaataacagttagcatatttatataaatgtacatatatatatagttaattgacttaaggggcaatagtgttctcaaattagcatatatatatatcatttattttcatacctgtgtgtacgtatacatacggaaaagagaggaaataattagggaatatagaaagaaaaagatttaagacaatctatttcacaattaatgatcactcatctagttaacttttcggtaaatgcaggtaaagaaagattgtgactgtttttaagattatgacaagtcttttattatgatcattgaactaaaccagtattaaatctccataattacaatttttcttaattaggaagatttaaggatcttatatcttttaaactatgatcagttgatttacatagaagtaaatttcctaatcacaatctctttcttgaatattgccaaaacatgtaacaaaaatatacatgtattaaaatgtttatatagcaagtattagattgtataattgtattgaataagctaaactatttaaaattaaaaggtgatattgatggtttattaagtatgagcaaatctattttggctgtacaagatatttggaaatcaaaaaaataataaacatacagtatgaaaaatattagaatattatatatgcttatatagaaatatttaattactaaattatttagaattctttattttaaaattttttgtctttaatcaatttaaattaccatgaataataataaaccaatgcaatgggatatactccatttcacgtacatagtaccacccttaccttcatatgacacaagagaaggtacaccttcatgagatactgtaacaccagtcgatgatgaggataattgctcaggaatatattgggaaacttgtggtaccattgtggttggtgatgtttctggttttctagattcgacagtaccgacaacagtaccagtttctgaagtaacgtcttccttatcctttgtggattcaataacaactgtcgtagatgctctggagtttttagatgttagttgattttcaccgttggcaaatgctgaaccaatagtagcggaaacaatagaagcagctggagttacatttgtagcagtagtaaatgagttagtctcttcttgttggttctttgaataaactagttcaatagaactatgcccaatgatagtagtcatacttatttcagaagttgcagatggttctggacaataagttgtagtaatagtaactccattaacaactgtagtcaaaacaactaaagtgtcagtcaaaataggtccaggcttttcactagaaatagtggagtttttgtagagaggagatgatatagaaattgatgatgacatgaagctattagatggagctggggtgatcacaacaacaacaacttcagtagaggaggaaccgttgctgttggtgactacagttgtgaaggtcgatgtggttggaacagtgactgcaccagttgtagtagtggataaggtagatggagctggggtgatcacaacaacaacaacttcagtagaggaggaaccgttgctgttggtgactacagttgtgaaggtcgatgtggttggaacagtgactgcaccagttgtagtagtggataaggtagatggagctggggtgatcacaacaacaacaacttcagtagaggaggaaccgttgctgttggtgactacagttgtgaaggtcgatgtggttggaacagtgactgcaccagttgtagtagtggataaggtagatggagctggggtgatcacaacaacaacaacttcagtagaagatgaaccattgctgttggtgactacagttgtgaaagtagaggtagttggaacagtgactgcaccagtggtggtagtggataaggtagatggagctggggtgatcacaacaacaacaacttcagtagaggaggaaccgttgctgttggtgactacagttgtgaaggtcgatgtggttggaacagtgactgcaccagttgtagtagtggataaggtagatggagctggggtgatcacaacaacaacaacaacttcagtagaagatgaaccattgctgttggtgactacagttgtgaaagtagaggtagttggaacagtgactgcaccagtggtggtagtggataaggtagatggagctggggtgatcacaacaacaacaacttcagtagaggaggaaccgttgctgttggtgactacagttgtgaaggtcgatgtggttggaacagtgactgcaccagttgtagtagtggataaggtagatggagctggggtgatcacaacaacaacaacttcagtagaagatgaaccattgctgttggtgactacagttgtgaaggtcgatgtggttggaacagtgactgcaccagttgtagtagtggataaggtagatggagctggggtgatcacaacaacaacaacttcagtagaagatgaaccattgctgttggtgactacagttgtgaaagtagaggtagttggaacagtgactgcaccagtggtggtagtggataaggtagatggagctggggtgatcacaacaacaacaacttcagtagaggaggaaccgttgctgttggtgactacagttgtgaaggtcgatgtggttggaacactgactgtaccggtggtggtggtatacacagtagattctgcaggtacagcaacatcatagataatttcagtgacagtatatccgtactggttagttgtagatgttgttactgttgaaatagtagtagcttcagtaatagaaccctcagtagtaacagttgttgtctttgtaattggttcagatatccatgcacagtttggaaaataataaaattgctgtatatatataaaggtaccaccaatttgatattgaggatcagatggagtaacaacaaatggattattttgcgtttgccaaccaccatcacaacttgtgttgaaccagtaacggtgaccatctattgcaaaattaatttgtagagatcctggtaaggtgttaaaatttttagcataccatggataatagtcaacacctaagaatacaatcatagactcgattgaattcttgactataagtgagcttggtacaatttttggattaataatatacatacccttgtaaacattgaaggtttgttctccaatattatttgtgttaataagaacaattgacccctgattaccagtaacttcaccttgaccttctataggattattgaaaatgatacctttcatatcatatctactagggatcaaataagatgcttcatttattaagccagcaaacccaccagactttataacaccattatttgttatagcaccaaggtaaaggaacccgtttgtggtcccacctttatcagcagtatcataatcaatagtacctgtgttaatgaaggaaccggttggagctatagtaaaattagtacctggtatagtagcagcagcatttaattgtgaaacagtaaatataccagagttatcaatacttgcaggtgcaataacaaaatcactggcagaacctgttgatttaatattttcgatgttgatgttcccactgtttgtaatagttgtagtagaaccaaattgtagactagttaacccgtttgttgaatcaccgatgatatctaaagaacctttaacgttaatattaccattgaaggaatatgatgaaccagatactaatgcaagagtagcacctgactcaattacgatatcatcggaaaatgtttgatcaccagacaaagttgttggtgctgaaatagttgtggtagctgcacttattttggtcacaagtaatcctaacagggaccataaaagtaataactgcattctagtaataaaaaagaaaaaattgagtcaatggcgaaatatattttactttacttttatttaatcttatctaattgtgtttttctttattgacttctgtttgtaaatattttgagaaaaaaacaaagagaaaagaaagacaagagaaagaaagacaagaaaaaaagaaaaagaaaaagaaagagacatttgcgtactatgacgaagattgagaaagtaaggaaataaaggtcaatttataagttgtatgtatgaaaatattgatacacttatatatgtttgttttctgagtattttcagtaagtaattattaaggagactagtaaaaatgattttaaagagggaccaatatgtgtcagactcttagtgtctaaatatatgcatgcagatatttctacattatttttcgatcattccgaatcggtgtatgaatgatgtaaaagatttgcatatcctattgtttccacttttttgtaggactttcgagccttttcgatcgaaatttgggtgagcagttacacccctggaagcaggaaaaaagtagggcttgcggaaatattccaattacttgtctcaacgtaatcatctatcttacccacaagaaatgttgtttttttttgttactttattttttgtttgtttgtatagcaaaaaatgttgaaatagattgttccaaataagaatgaaaaagtgttcctgatatccaatacataataagatactgattaatgaccagtgttatattttattaaaaagcacagaataagaagtagcaattccaacaataacttacagcttgttcctaataatatggaataattatataattatataggtatattcattgtcttttgccttataaattattgaatctctctacttgtgtgtatgtgtgtgtttttcacatatatttcataattgataggtcttcaggattgcatctgttttctttttgaatatagaaagtagggcaagttgtgtttttctttttcccccttcccccccacccaaaaataaaaaaacaaaaaaaaaataacaataaaaatattaatagaaactggaaatttttgcacgatcccgatatctgataaaagaaattattgaacaatagtctacaatacatgcataatcgttattgttacataatgtattatatgaagcaagatttagaaaaacattattgttagtcttttctctctcaaaaaaactatcgggtattaatataagggacttgattgtttggtaaataataatagtgcgaataattatggttctaaaaatgtttggtgcatatctaagaaaaagggagaaagacgtgaatgatgactatattcttttattctctttttttttcttttatttctggtagtcttaaacctattaagagttttcgaagttcttcattttgatgttcttagaaataagtaaaacctacttaaaagatataccaaaaaaacaactttaataataattttttttgacatctacattacgtttgtgaagtagaagatccatattatgaacgcaatatgttgaattactaagtcttgattaaatagaaagaaatttgttcttttatttttattttttttttggttggaatattctttaaaatattgttagaacctaaaaaataaagcgtacaattttaataaaataaaaaatgtacaatatttgccctaatgttgtgaggctaaaaaagaaagaaaccgcagacaaaacaagaagcccataccatggcactattttttttttctatgactgacaatttaaaaaccgttatttctggggatcttttttcttcatttcctttttagtacacggtgaataattttgggaaagagaaatacctcatttgagttttataagaaatttcacaatacgggaaaaaaattttcagggaagaagagaactttttgaaagaaatttttttttgcctttatggatgttttcctttctgctacttcttgcttgagtcttgtattatttttaaaattagtagagaaccactttctgttttctttttctgttgtacagagaattaagaatatcctctgaactataaaattttttgttggccaagttagctcatttgataacgataactataaatgtacaagccataaccaattggttctgcatcattaatgtgtataggaaatgtccaactagagtattaaatgggaaaaaaataaataaataaataaatagacagcacgggttattgtttgcaaagaaaaaaaagaaagattgttgtttttttgttacggaactattgttgtattaaggaattataatacatgtaacaaaaacaatacatgcctgaaaaggtatatagaattcgacaatcaccaaaatttgtcgaagttttatcaaaaaaggaaatatttaaataaacacacaaaaaaactgaataaaaataactttttttttatttttgttatatcacaataaatactttaacacaacttacaatagttcttacttctatactagcaattattcaacaaaatagatcaatacaagttgcttcatacacaaaagtctcgcaatcgtatatttcttcttactgtcttttctattttatttttggtattgaaattaatcaactaatctgtaatgcctgcaaatctgtaatctaggagattttagagtctttgtactgcatccatagattgtcctatttctataggatttaatcttctgttccccctcccccctttccgcctctccccatattaataatttattagtagagttcaacaaggtttgttatagaatttttttctttcattttattttttttggaatcactaaagactttgctgaggatatttttcatttttctatataattgaacttacctaacttaatttccttgatgcattatacagtgagttattgcttttactaactttcattggatttaaaaccatttacttaacaacattctaacattgattggtttaatagactacttgatgtttttttttttaaaaaaaataaaaacgaggattctcagtctcttctgacaaatttgataaacttgctactggttgtaacatatctgaagatttttaattcttactaaatcaatgatagaatacttatttctattgttcctcaatttaaccagcaagatattttacttagtgtatacaagaaaaatctaaactatatttatgttacctacaagtatgtgtttataaatttaagtatgccttatctttttcttatcaacttagtagatttattatcttgagattcataacgctattttaacagctgctgataccttggttatagtaccagttgttttttttttttcattgtttgttccagtggtttattcattcctacatcacatatctgtctgagtcatgaaagaaattataatctgcttatgatcatgtatttttaatatgcaattacctaccttccttggtctttctaaatttttttttgattatttgcttttattacaataacgttattcacaactaattttttcaagtgagataatgcactagctttaaatactttataaccatccaacttggcatttttaattgtttgtttatgtagaggccatataccacacatgtacatatttggttattctttagagttacaaagagtcttgattggtataatcagtaaagatttctttattttaacaacactacgttgctagatagtagcaaattgtttttgcagaaaatttgattttgctgtattggatagtacacaaaatatcataaactgcgttacatttgtttgtatcttcttttaatgttctacatgcatcttcaagtgaaaaatattgtctctgatatgttaaatgtatgtacttttcttgatattgcatgataattcaacaggtacacctaaattgtacttaggcattcgtactgaggggatttcaattttttgttatcttgaagggggagaaatatagtgtttgtcaaattgttgtttttagaatacgctgtaacagataatgattaattctttatgtaaaaatttctttggtactaaaacagatataagatgaaaaaaaaaggtaaagaaaatttttaaaagttgattgttgtatgttagttagcttttcctattcatgcatcaatcctagaagtcttcctatttaatataaaaaaatcattttttatatgctttagatatgttcctataaggataaaaatatgtttttttttatttttaattaacaagaaagaagtataggttatagaaggaatcaatttttggtactttttaaagcctttttttataaaatgtagcatttagattttgagaattagcacctttgtatatgtattgagttaaatatatgctcaattacattctataattattaaatagttttagtactcaaaaatacgacaaggctattcccttttctacttacacaaagtatggagttaagaatgtacaaaaaaattgtaaataaaatatgaatataacacaaggagatggcctttggtcttatatatacgatttattgagtagtttctctctgcgaacaacaaaaataataaccaaatagttttattgatgtttattaatatgtaaactgttaaaatagaatgttctatgatgaaatagatagaacaataagattttagcagacattaaacgataaattgttgggtaataatcgttgagaggtcaccaaaagttgttgagtttgtttattaaatatcttactgtttgtagaggaaaatgacttagtattaacatatataaagccgaggatttcatcatacattacttttatcttatttacaatctttgtatattattatttctatgttgtatatagagaaagaaagtgaagaactttattataattttgtataccaaatctgtttaatataatattaaaaatgtttactatatatccgatgactacaggcgctcactctcatcaatatcaaatattcaaaggtaagcataaataaacttccattaccaactatccttttgtaagttacgttcaaaattttacctttactttgttaaaaaaatatgaaaaatatcattttcacgcacacttatttaatgttcaataacactaaagcaacaagccaatgaataaaatctaatgggatttgaacttttattgcattaatacttttgaagttagtagttttgtaggatacaatatgataattgaatgatcaattcaagctgttataaaggatggtattactgataagtgagtcatgtatttcttctgtagtatttaatatttctactcaagaataaaaactgccataataagtaacttgttcaagttctatagtctattgtaaattcataaagtagaaatataataataaacactgtataacatttttttagattcaaaatatgtaactataaaagtataatcaaaaagtggataatgatcaaattttctatggagttgaagcaagactcattatagtggtaactattaaatttacttttgatggaaaatatggtaaaatatgctaaatttacttaactaccatgaatctataattactatgtgcaattctatttttgagaagcaaatagttgtaatatgactaatattttttgacagttgcattttatgagtcttagagttcagtacatatatttagcatacatagcatatgataaaaaaaaagatagtgcttgtattattgatatatatatatatatatactattaaagtggcaatcagcattatgagtaaaaaatacttcctaacgactacttactcatacatgtcaggtcacaaaataagaaaatgtattctactctttgtaccaaattgttgctctttcataacattctagataaagagtaaacctagaccaattcgcaagatactagttcaactttcttaacatatcttttaacatttttttttttcatataatttattgtaaaaaaaaaaatacttttaagagaatcatatttaaatcatctatctatattttttactctaaattcttaaaactttttgacatttacaactctacaggataagccatcctctttatgaattagaattttcttgtgtaaataattttcgagaaatgtacagataggtttatccaagtatctttaaatgttcaatacttaattcagcccttaaccttattaattaattgatttctttttttgtttccggtcgaaaaaaactatccaagaaaaataatcgaattaagcacatttgaatgtcaagaattgaaggttgcaatgctcacataatacattattctcaactcttcacacaaaaatataatagccaatacaaacctaacaagactgttagtacagtattagtgaacatgaacatgttaagagtatcacatatcgattcagaggaattagatacagagttgtatgaacttatatggacaaaattcaaatcgattatccctttagtaagaaaccaagaagaatggaggtttttcgttgataccctagtatttctattttctagtcattacttcagttttagtggtggtataacaacaacttatggttctcatttaagtaatctgggtttcacatgccataaagtctccttataccttctttctgtcttcaaaagatatttcaacaataagttatcgaacagatgttcatcttcgccactctataaaagaatacgaacaattattaatctattggatttaattaattttatacattttattagaaactctaacaccaaatattatacaattttacatcgaatattaaaagttcaaccagtaagtttggatacaggttcttcattctacaagaactccatatattcaagattagagtatcagaataaacagttgttatggaatactactttggagttattgaacataactatattacccagcacaacacaatatttcaattattttcgacggaagaacaatattagcacaaccaattcacctacttctaagcatgttgtttgttgtctttgtaatgaatttcccactaatccgtatagaattcaatgttgcaagggcatatattgttatttatgtctattgaaaagcatagaatggaaacattgttacaaatgtaatgaaagtggtaatttaaaaggaatttcatattttgaatcgtagataaaaaaaaaaaagaggaaagaaaaaaaacaaaaaggaagaaagaaaatatggacagcattgcaaagaaattggtacccaattattacatataatcgatatctttattatttttctctattagatttattttactctctattctattttttttttttttttttttatataaatattatacataaagagggaataatgaatattaactagaacaatgtatatatgtatccaaaatcaatgatcagtcgatcttcatacggacagctttaacttgagtgtagttatctaatgattcaagacccatttctctccctaaaccagaggcattgaacccaccgaatggaaccatatgatggaagtcattgtaagtgttaacccaaacagtaccggcattgatattttctgacaacttgattgcattgttaatgttggaagtgtgaataccagcagctaatccgtattctgaatcgttagccatcttaatgacttcgtcaacggttctgaatttagtgacggtgaccacaggaccgaaaatttcctctttgacaattctcatgtcctctgtgacgttaccaaagacggttggtttaatgaaataacccttatcgcctaatctttcaccaccggtgataatggtagcaccttcctccttaccaatttcaatgaatttcaaaattttttccaattgcatttgagaagtttgggcaccctggaaagttaactcatcaaatgggttaccaaccctcaaattttctatgctggtcttaagttcttggataaaatcgtcataagctttttcctctacgtagactcttgaacctgcacaacagacctcaccagagttataaaagataccagtgatgacattttggacggccttagacatgtctgcgtctgcaaaaacaatatttggggatttcccacccaattccaaagtacatttctttaaagacctagcagcgttttggtagatgtgtttaccagtagcagtggagccggtgaaagcgattttcttgacctttgggtgggtagtcaaagcctcaccggtgatcttaccgaatccagagacgatgttaacgacaccgggtgggataccggccttggcgacatatttggaaacgtacaaagcagataatggagtggattctgcggtcttcaataccacggtgttacctgcggctaaagctggaccaatcttccaagcccacattaatagagggaagttccacgggatgatttgaccacagacccccaatggctgtctctttgtgtaggagaaatgggtggagcccgtgtttatggttctaccgtcgatcttgtcagcaatccctgcagcggacttcaagtagttgatgaccaactggacgtcgccccttgcagaggcgatagctttcccgttgtccagggactcgatggaggcgacgatttccttatccttttcgatgaactcagccagtttatatagtgcctcacctctcttgattggatcgatcttactccaggagccgttttcaaaagcctttgaggctgcctccacggcgatttcgatatcgtcttccctaccttcgtaaacgtggcaaatttcttcttcggtagatgggtttatgacttcgaaagtcttgtgttgtacagatggaacgaatttattgttgatgaataaaccggttggctgttcgtattctagaccgttaggtaatttgatgttaacggaaagaggtagttgcgagaaacaacgaagttgacggtatagtgtatatctagaggatttaacagtttgaacggatgcagaaaacatgatttttgaatattaattagtttagtttagcttaatttaatttaatctgtgttgagttgtgttgagttgtgttcttttttgtttttatttctttatctttttctgttattaatacatatacttagatgcggcagttgtagtagtatgtatatatatatgtatgtgtgaatgtgtgaatgtaaacaattaaacaaaaaaggaggggaggaaaaaaaggtgtatacaattaacggtgttatatatataatataatgtaacataattctccacttttctctaatcttctcttctcttctttccactagccgactccacaaattaaagcacaataaatatggctctagcaaatattttctctaagtaagagtgttttgtttcaaatcctagagaatgaataaccgttatgagaaaaaacctttgctctaactaaccaatgggataggatatccaagaataatatccagccatgttttcttttcccaaaaacatccccgactttgcctccactcttccactcttccactcttttttccgactctaatgcacctaaaccagtaactaaagtaggtatcgcccatctacattactaatcacatctaccgatgtccttctcatctcatccccttcatcttcttcatcggctattctttttctcctcatctctttcttccgttattgaaaaaaagaaaaaaaagaaataacataacgtcatacgtcatagtgtgagaaaaaggaaagaaaacaccgaaaacactttttgtttgttattttattattattattattattttttttttcttttcttttttcagtgttttctgggcttaccccgcttttcttcccctttctttcaacctttttttttctctctcttcctcctcctgtgcccgccgtctttgccccgccccttatcttatcttatcttatcttgtattgtattgtattgtattgtattatattgttttatttttctaaaatgccgtttgtacaatggaggaatttttgcttttttttctttttcctttttgcttttttctttttgcttttttcttttttccgtttctagttggctttgggtttttttgttttacgtttgtatgaagagagagaaagggtgaatttggataatgaaaagaaacaagaagaacaaggaggagaggaggggatggggacgggaaaaaaagagagtggagaagtaaaacgaaacgactgccccaacaaatgaacataaatagtaagctccgttccgtggattttcttttcttttcttttcttttttttttttgtgagaggaagagaaaggggagagacaaacatccacacgcccacctctgcaccagccgtgtgtctttgctctcttttttttttccttttcctcccctctccgctggatgtatccattctttggtgagaaataaataagtccgcaatctcgggcttggcaccctacaatcagggtttgagctatcgttagggttcgggtgagttgatcttgtaaacattcattgctctacctcttctatatctatctatctatctctctaatacattatatgtgtatgtatgtatacgtgtacaatctttaatgattctttcctttttctttttctttttctttttcttttcctatatactgatatactctaaacatggaatagcccttttcaacattcctttcaattcaggttctagtctctctctgttcattcttccgttctcatacaacagccttttgtttccatccagttttaaaatcttcaaatgactatacggcaaaaactgtattaaattctcccaacttgacaaatcgttatatgataagttcaattcctgtatagacatcaatctaatctccatccttgggtccctaggcaactccctcatcctaccaataccaactatctctaacttctgtaatgaaccaggtatcttgctcaaggatatcaaatcttccacatccccgccaagtatactcaacttcaccatcccagttggtaaaaacttcatttcaggaaacctcttataacatcttatctctaattccttcaatcttggtaacggtaaaaactgttgtgttctcgatttacccactattttaagtctatcagatcgtatctttaatatttctaccttactcatacatgtacttgtagtttcactctcactctcactctcaccctcaccctcaccactattcatgtcttgatggaatataacagacactaacggattcccattcaaatttatacttcttaacgacctcaatctatccaagttatatacctcggtgatctcattgttactcaaatctaaatgctcaacggcgtgccatccatactccccaacttcctccattaactcctcaaagtctatcggccccctgatacaattatcgctcaaatctattctttttatcatcgatccgctaggtaatccgttcaaggatctgattctattggaacttatgttcaacttttgcacattgataaatccgtgttgtcctaaccatgacaaatccgtcttgaattgattatttgataaatttaatatcttcacattattactattattactattattactatcattactatcattattattatcattatatatataggtgtcatttattaagttcttggaaaggttcaattctatcaaatttttagggatgctgttgccactattaaacagtttgatattattgttcgataagtcacatttaattagtgatggtaaacataacgctaaacttgtgatatctttcaaatcctgtcccttggcatccaattcagtaaccgtctcccagtctctatctatcaataacggagtcagcttacgtatcaactgcattttatgtgcttctaatgtctcaatgctcgattccaaatcttggaagccagtcttgatcctaaatggtaatggggtatcttctagaatagaattttgtccgtttcttttcgtgtttttcacttgtctactatcatcatcatcaatgtcgttgtttttgtttttgtttttgtttttgtttttgctgtaattagtgttagtgttattaacattatcattattgtcactgctatgactacgatgattattacttgttcttagatctttgaaaagatggattttgcttaactttctttcagatggatgcgtagcagtagttgtagcagtggaagaacttatatctgctacggtatggtttgcagatatgtcttgtgaattcgtttgatctatatctcgtacccatttacctaaattgttttcaaaatttaacccagctactaatggtgtaattaatgtcatcttattcttattctgcgatatcatatcatcaaaaacattatttgcgtcacgcaacacttcgtttgacgtctccaaatcttcactctgctcttcctcctcactactgtttatcgtattgatattataattactaccgttatcattattgctataattattactgctactactgttattattattattattattattattattgctgttgttgttgttgctgttgttgttattactattttttgtctttttatttttaaacgtgttataaacctcaccagataattcgcctattcccttaacaataaggtcgtttagactatttcgtgtcagattagggttaccatgttttaagttgtctctcctttgacctttcctcaaatatgataaaaattctgggtcatccatagtggttctgttcgaggatttgtgacgttgctgtactgtatcaaatggatcgtggctcagtcgcgtactgctatgaatagtgacactactattactaccactatcctgctcctcattctcattcagtagatcgagactttgatcactctgtgaatacgtattgttgttatctgtataaaactttgaattgcgcattggagactgtaattgacggtcagaaaaaaacgaagagtaagacaaatttgttgattttccatcatgtgaatagttcatttgattatgattatcattcaagaaaaaatgactattttcgtcaatatcatcaccgctattattattgttattattattgttattactatgacgattgaaatatctattaactccccttaagttacttgacatagagtcatcaaactcactattcgaattcaaagtatcataattggacaactgcttattaaaattattgtgattatcattccattttgaggaaacaaccgggttttcaacatttgagacatcactgttgttattactatagtctacgaattcttcataaactttcctagccattttagccaccaatttgcccggtgtacttctgtataaacaataattcagtcaaaaatacaagcttgcaaatctctcttctctatttaaataaacatataaagctaataccactacaacaattttctagcataaccatctataactgtgcaccagtattatgaatattatgatttttaggatgattggatcaagtgaaaaatctcaaaaatctaaacaaatagagaggtcgaggagattttttttttctcttcgttactcgcagaacacgaaaatattttcgcactatttacgtctctgttattttgctcacagaaagtaaacaaacgaaacaaaaggacgggaacctcatcacgaattgtagactattttttttttttcgttcctccccctccaaaaaataaataaataaataaataaagatatacaaaaaaaataaaaaaagacgatttcggtttgaaacaaacaaattttcatactgaaagacaaagaaagaatgaagaatccattgatttgattgatttgattgattgactactccattgcaactgttagtaaatgcaacttgctggttgaccagatttttgcagcatttgtttgacacactagatcttggatatacagatactctaatcacacacaactatattattcagtataacaggggtgttacagtatatatcatcagccagggaaaggagatccaaaacaaacaagcaagcaaagccaaatacataaggttgagttattgggtaaagaaattatatatatcctgcttggcacttatttcatacatattatcttttcagttatattattaacaaaggggtagacataaaaaattataaaagacatatatctaattgttgtaagaaaattaagcttcttctaccactacttgtttgccagaaacatttctttgttttttctttgtttctttcttcttcttcttcttcttcttctattctacaattacaaaatgaatggcagccaggttcgaagatcagatgaagatttgattagaaatggttcaatggtttcaataataaacgatacaggctcagagaaccaattttttaaagcccttcctgacaatatgaaattgtcttttaatagcccaatacaatcaaaatctcaatttccgacaccatattcctcaaacttactagacactacacagagacacaatattttaacaatgaataaaagcaatagcagtagtagtagcagtagtagtaacgataatgatgctaagactaacaaaaataatgatattagtaccacgtatactgctcatgattatgatactacgttctatggaaatccagattcttcttttattgataaaaattcgaatatatattcgaaaaacgaagataatgtacatgatgcaaatctgaataataccatacataaaacagaaaatgataggaatataaatattaaaagggaaaaaagttttaataaagataattttaacaacaacattaataacacaaccgaaaatgatataatagaaaatataaaccatatgagcacacaaacgtccaatgcgttacaattttcgcatatagaatctactagtataaagcaatctaagtacccatcgaagataaacatgaattataacagtaataacaatgtgagtcgcttgaatattccaactgttaataacaatatgacaaataataataacaataacaataataatattcacactgattttttattgccttcacctgtacagtttggtgaatttttatacgattcacctgctgggataagttttttccataatacccctgcaaaatccccattaaaattcataacagaagattttagcactaatcatagtaacgataaaaaaactaataaatacgaaaatcagtataatggacctacctcttctaactcattgcatttttttaattcaatcaataatgtggaatctaataataacaacaacacagatacaagctctaatcaaaataataatattaataataataatactaacaatacattaatagatatatgggataaattgtctagtaatacaaggactccgttgcgtaaaatagatatcaatctaatgttcaataatggacaactattaactaattctaattcattatcacctttgaaaaaattttctatgtcattgactccatatggtagaaagattttaaatgacttaggtactccatttaattacactgtaaattcaaatcaaaaccaaaaccaaaataacaataataataacaataataatattgttacaaacagtaatattaaaacgtacttattcggtggatcatcaaatagcgccatgatagatttccagagagcaagaaaaggtataatatttgataccccaaatgatattaattcattaatgaaaaacaataccatattgtctccaagtaaacttagctcgtttgatattgcattcagaagccctaaactgataacgacccccaaaaaagataaaagaaacaacaagaacagtttaaatgatagtcatatacctaagttaaaaatcgcaagtgataaaaacattcacgataatattcagttggatagtattgataaaaaactggatcctgatgcacacgttgatgaatcatcacctactacaattcagttaaattcctcagtcactaaatcattgccaaagatggaaagaaatatttataacaaactgcctgacagaattcctttattatcaagaaacatgtctcctttacaaaaggttgctttggatatgagtttttcgccaacaccacattccaatcttcatgctccagtagatatcaaaccgcggcttccaaatgaaagccgatcaagcagtaatgtacttacgtttttgccagtgtctgatttaccaaagatgggttctttcaagagcgaacgtacggcatctacattgactaataacgacacattgataaattcacaaaattctcaaaattctcaaaaatcagcatcattaccaaagttaccttctataacgacgtttccctctacaactattctcccacaacaggtacagtctaaaaaaggtgtagtgaagaaaaaaagaataaccaaggccaaacaaccgaaattccaaatctttgtttctagtgttcacaagtttagtgacccaaattcatctgttccagtcacatccttaaagcatggccatcatacccattcatctgctaataataaaacaaacaaacgtactaagaagtaaggtgatcttgtttgttgattttctggtttagaaaatatagctatttaaacataattatttacgaatcttttagtttcatacatacataattttacacatcgatttaatttatatacatcctgagtttcttgttgttatgaattttagatatcaatgataatctccacggtatttttatatcctttgatttttggtcatatcttcaactggtcaaaattatctatgtagatgtcaaaattcttcagagtttttccattccgaaaacggagtcattttataaaggcacccgaagatagtgtcaatggaattttagaggagattatccaactagaagggtagtcacattgttaaacgtctttacatgtaaacatttctgaaaggacccattcatactcaaaggaaacattccaattataaataaataataatcaagcagtcccgcttttgtcctttctttccctcctagcccattattgttgactcagataatatatatgagtaaaatatattaaaatgccagatattatttctcaaaaagatcctttatcagcctatgatacaagcaagttagaaaacttcgaaaataattacgatgttatagaatatttgaccaatacttcttctctgttggatataaccatagataaatataccgagattcaattgaaagaattgaatgatatgcaactgagtaggtattatgatttgaagaagggtagcgttagaagacaaagtagtataattagtggctcagaatattcaaattcttcacctaaaaatgtcacttttccaaccacatttcctttaacccaagcaaatgatagtaataacaacaatggggtaatagatacaaatgttaatagtagtaataattctatacatacagaggttattaaatatcaaggtttgatggatcattttctttcttgttctcagaatagcatagaaccttaccaagtgaaaagaaagttgagtatacctctgttaggaaaagttagaaataaccatagattagttagtccagatgatgagaatactagcactgaaatagatccgcagatagaatttgatatagaaacaaatctactacatcaattaaacaacttcaatttttcgaaatatacttcagagaattctcgaaagaacagtgctaatggagcaactaccgaggaatcacaattacatacaggtgattcatcgtatccgataaatgcagatcttaactcatatctttctagtagcaagtttctccatcaatatacagatatgcttcaaatgaattttgctaactcatatagaaaatattacaaaaaattgttaacggtgaatccggataacacagacactttgaaaaaacataacttatggattcctatgattagagacgactgtaaggatctgttgataggagattatattaagaacatcgatatatacactcgtaagacatgcccattattcgtgaaaggtttagattacataccagccatgtatgatacattctctgggtgttcagttatgaaatcggtcttttcagagtataaatttccaacattagtataccattgttccattacaatgaatagacaaatattcacaataggtggactgatgccgtgttatcgatacgactcagaagcacctgatccacataggtattttatggaacctattaagaacttaccacctccccttttacctgaaataatcaataacccaattttggtcaacaatccatatctatacatatattctattgattcgtcgagattatccagggtaacgccttcaggacatattccacctccattattatgtgctactgcttcaaaattaaccgaaacacatattttattctatggtggatttgaaattaagacagaaactaaatttaaaaataatgggaaatattatttgaaaagaagtgcatatttaaataatactgtatacatactagatacagtttcattgcattttacaaaagttgatgttgtgactcaatcgtacaagaatgttaaatatccaactttttctgctagatttggacacatgcaagtatctaccaagggtattaaaaacattggttatccaacagacattggaaaggttgatattggtacaccaacagaatcctctacatcaaataactccacaaggagtaattctgtgaaaagtgatgtatctgttaagatgtctctgaaagaatcttcaaggttcatgtcaaatctatctaatcagggtattgatgtctatactattgttatatttggtgggtatagacaaataggggatgataaatacgaggcaatgaatgatatgtggaaattagatatcaaagttatagagcgtggcaaaagaaacttcctaaaatttgcagatactgtaattgcagttaaaataccaggtataaataatgcagaaaattggccatcaatgagagcattttttgcctatgatattccaccatttaatgtcactaactatgatactttacaagataaaatattaaaaaatttggaagagaatttcgagatagagtatccagattccagagaacactggaaaacaaatgcagtggatactatagatttctctaatatacataatacaccgatacgacattccacaacaaaccatagccgtaaatcatcaatcacatcgacaatttcttctgagagacacattggcgctactgcttcaattcaaaagtatcaaagtacgccagtcgcttcaacaacaacaaaggcaaatacaaatatagcatcaaacagtaatgagaaatatcagcagtttttttttgctgaaggtagccctccattcatgggtggattttccaattctaattatgtcggcggtagaacgattgtcattcatggcggttcaaacaatactgaagtatttggtgaattatggtgttttaatttagatgaaggttcttggaaacgtgtggatacctatggtactataataaatgacttaagaaaccccattcctgcacagatgaaacttgtcggtcattctatgacctcgttaggatatatggctgttttgacaggtgggttctctgaagcagacgttaacagaacatataagactacaaagatgggaatggaatcagaaatatccggaaatgatgtatcaaatagtaattgtcaaacacacgcagttaaaaatagtgttatcaatataatggacttgagatctcgttgtatacaaggctgcgtaagatcgtctaatagtcaattagctgttacattgaagaataataactcagctgaaacaaatcctacaatattccaaaaagaaacttcacaagatatttctaaatctcatcttatttcaagtgttggtgggacagttgtcaaatctgacggcagcttatttttaatcggtggcttagctgctagacgaaacatattaaacaaaatgtacatgcatgggtcaatattggaatttgtgcttccaagcaaatcactaataagttaaacctatacaatgcattgctcctcatgataaaccattggatttattgtagttcatatttctgtggataggaatctccggagttactactaaatatgtgagttatctgaagtttaaaaatctgtcacaaattgttacctttcctaaaagggcaataactattctctcaagaggtaaaaaaaaaaggaaaaagaaaaagaaaaaaaaaaagaaaaaaaattttcactgcttcaattaagtatattttggctatcagttaaatagaaacgtaataaaacaaaaggatttttgtgttgtttttatggtctttgacaattggttttctgttatccaacatgtactgtttcgaattaatcgttacattactatgtttaatgcaactttgaattgaattatatttctagctactcttgcaatattactatacaacaacaaacaataataagtccagtttaataactattgtttttagtgaaaaccataagaataagatatcatattaatattagaatacaaacagctaacgaaaaagagtgtgtcattttataataccctaattgcagtatcagtgaaaagtaatatttctttaagttatttttactcacttcaacaaacttagctatatattatccaaaaaaataaaggaataaaaaaaatattaaaacagtcattacaatgctaagtccagaacgtcgtacatctatggcagaacgtagaccgtcattttttgcatttcaacaagccacaccattacttgtacctcatttggcaggtattgaagacccattgccagaggctactcccgagaatgttgatgtattaatagttggtactggcatcgtggagagtgttcttgctgcagcattagcatggcaaggttccaatgttcttcatgtggattctaatgactactatggtgattcttctgctactttaactgttgaacaaattaaaaagtgggtatctcgaattaatgacaataagattccctgttataaaaatgcgaagttatatgcttcaaatgatattggtcctacttgtaaatataaatcaagaagttttggtattgatttatccccaaaaataatgtttgcaaaatctgatcttttgtctatattagtgaaatcaagagtatatcaatatttagaatttcaagctttatctacttttcatacttttgaaaatgattcattcgaaaaattatcaaattctaagcaagaaatttttactaatgatactttaccattaatgataaaacgtaatctaatgaaatttcttaaatttgttttgaattgggaaaatcaaccagaaatatgggagccatacaaggatagatcattagctgaccttttagcagagaagtttaaactggaaagacctcaagtctttgaattaattttttctataggattatgttataatactgatgctaaaatccctgaaacgttacaaagaatccgtcgttttttgataagttttgatgtatacggaccattcccagtattatattccaaatatggtggtgcaggtgaaatatcacaagggttttgcaggtcagctgcagttgctggagctacatacaaattaaatgagaaatttgtgtcatataatccagagactaaaattgccacttttgaaaatggatcaaaagtcaaagttgaagaaaaattggtactatcacctagtcaagcccctgaatatagttataatatgccagaacaaaaatatgaggtgcatagattgacttgtattgtagagaaggattgctctgagtggtttaatgggaatgaatctgcagcagttattgtctttccaccaaactcattgaaatctggtaaccaagaggttgtacaagcaatcattgttggctcaggttctgaatgttgtccagatggaacgtgcatatggtatttattcactacacagcaagggccacgtgcagaattggatcttgatgcagcactagaggcaatggaaatcagtattattagagaatcctcagtcaaaataccccaagatgaaagtttagtacaagtctcagaagatgggcattctacaataaattcatttaaattgggtcaatcatttaaagaatacgtgaaaagagaaaaggtacaatttttgtttaaattatattatacacagtgtacaatggtccctccattcaatgtagtagacccttctttattcatgccttcttctggagcctcttcgaagtttattcctagtgcttgcgacaataatgtgatatatactgctatgccaagtagtgaaatatcatatgatgaagttatcacagcagctaaagtgatatatgagcaaattgtgggaagtgatgatgatttctttgatatagattttgaagatgaggatccagtgacatctagtaatagttatggtactagcagagctattcaatatgatgaaaacgctattgaggatgaagaagaagaagatatcgatatggatcaaggtgataaagatggagataatagtgacgttgtgggcaaattggaaatatgatcgaaggagcgtagaattttatgatactatgctgaaatcgatctaataaggtgatgctataaatagtcttctcctaacctcagttttttttttttttacattcaatttttcaaaccgatcttggctattaaaaggttagtagagagaaaaaaatataaaagcaaatgtgacttcattacagcaagaatttgtggactttacattaacattgtttttgttttttttaaaaaaaagattctttttttttgcacaaatacatagatcgaggaaacatataaaatggaacaaatatacaattgattttgtatctttttatataatctaatgtgtaacaggtacgtattaatatttcattcatctatcaaaacaatttacaatcaataatatctaagacctattcagttagttgaggttgggtggtcttcggaatcaataattatttttctcactttttcaagacggtttttaatttaataaacccagacctttacagttctcccataaattactctttttggaacttttatctcttttttatttttatttttattttttttaaatttgtatctctctcattgagcgatcaaattaaatttgtttgcctattctagaaatcgagaaattttgacttggagacattcaatttttttttttacaaagatgctttagtagattgcagttaaggcattatctcaacaagatgaagtagggaatatacaagagatgacttcgctagagtaagtgtttgttcgacgtactttttgatttcttaatagttgttcttatgattccattttaaagtcaccactgagcagtcttttgatatttctcctgtaaagaagtcacactttaaagaaagccaaatacaaaaagaagcaaagaaaaatgtctgacgttgaagaagttgttgaagttcaagaagaagttgttgaacaaactgccgaagttaccattgaagatgctttaaaagttgttttaagaactgctttaatccacgatggtttagctagaggtttaagagaatctactaaggctttaaccagaggtgaagctcaattagttgtcttagtttcctctgtcaccgaagataacattattaagttagttgaaggtttagctaacgatccaaacaacaaggttccattaatcaaggttgctgatgccaagcaattaggtgaatgggccggtctaggtaagattgaccgtgaaggtaacgccagaaaggttgtcggtgcttctgttgttgttgtcaagaactggggtgctgaaactgatgaaagagctatgatcttagatcacttctctcaacaataagcaatttaatatgtaaagttattttttggactgatatctttttttaattattcgtctcatttaaatgttactttatttattaggttagcttagtatcattgaataattatttctttttggttgatttaatttctttatataagtatttatataatttatatataaattaatttcaaagaaatatacaaagttagcatgtcatcatcaagcttcctgttgttttttattttgagtgacatttaattgtaagacttttatgcggggaggtccacaagtcatgcggcatatgacaggatattatggctatgcaatttctgaatatttgaatattttgattccaatattcacttaagccgtcagataattaagaaagttaaatatgataagaaggtgagaaaaaagtggttaaaaaaatggaaacgccatattatcaaattgcacggacgacgtaaaaccttctgtggtagtttcagcctcactcttgctatcttccatactattagggttattatcattattaaaattgtcagaagctgtgttagatagtcctaataaattattagtttgattccatggttcaattgttgcaggatgtggtcgttttacgttagttaagcttctcaattttttcatattttttaaggtgatatcaattaacatttcaatatcttgtttagcgattatatctaaagaatcctttgtaagcattgtgatttcaataactacccctggataatctataggtaattgaggttttctattattgtttatgttattagagttttgttgattcaaaatattgttattattgttattttgtcttttatttgaaataattatattacttgtttgacttaaaatgttcaccccaaggacaccattcgtatctaatctaattaagacttttgatgcaatcctgcaactcaatcttatcttgtcaaacctgttgaaatcaaaatatgcaattatgggaacatcatacaatagtttattattattactatgaccatttaagagatcgaagatttctaatttttcaataatatttctattgttaggcaagatgatcttagaataaccaatatcagattttgctattaacgcaaatacattttcattatagtcctctctcgaagagactttcgcataaagataacattccttagcgttatattctttgagatctcttaatgcattatataaaatatcacctttgattatgcattcaaattgaaccaaatcacgctgtaattgcaataactcagcttctttatcctttaaagcttcattaaatagatatgttgaataggaaactttttcctcgacaagtgaatcctgcaaaataagagagaacactgatccataaccatcataattcattgtgcattcaattatatcgtcttggtttttgttgactacattgatagtatctagtaaatgactcaatttgatacaaagtttcatacaatccgattcatctaatatattattattgttatggtgactatcacttgcatcaactgttgttgatatggtttgatcatcattaaaagtataggataaaaataattctctagataacaataattgtattctaatcgaaccatgataatccctaataaaggataaaccatctctgtctatatagatcattacatcatcattatttattgaagaggacccgcctccaccaatactgtaaccaactttatttagattgtgagatatattagttgacgtattcgaatatccagaatttgaagaatcatcatagtttccaccaaatggagttaaacaatttaatgctgttgtgatatgatctaaatgaactgtggacgcagagaatctggggaagtccattgtagctatatttctttccttctgtttttttttttttattatatggattgttgctagacgggggatattagtattttcatattagacacaatttgaagtactttgccacagtaaaatagattaggatcaaacaaatagagtattatctattaacgataaatgagcacatagagaaacaaagaagcaacaatgagatgctgctttttgtatcattaatacttctaaccaaatcttccaaaaatgtagtgatgttttttgttcaagagatgtgtcaaacttcaaccggaaaaaatgttattggaaaagaagaaaacttttgtgaaccctatttgctggtaacatactttctcaatgaggacataaaaatattagtagccctaatcgcgattcggtaattaatttttgaagtttttctatttttcaatgtaaccctcataatgaatttagaatagcaacaatatatggggtttattaaaagacacatacacacacatatatatatatattaacaaacattgatgttgacatagtgtagcattagagacagtgaattgtaatttgtttttttgttacttgcaattgtgattatagagataggagagtctcaaagagaaagagaaggataaaatggttaataacagacgtagaaaaagtaatcaattgattcttgggatcacactagctattggtattggtacatcatgttactatttatggaaatcattacaaaatggagaagataggaaaataagcgatactcccataaaagatgcaaccaatgataaaaggaataaatcacgttgtgtagtggtaacatctagtgtcattgatacaatgaatgtgattccttggtcacaattgttagaagatgaagaagatttagttttgattgttattccaagttgtaaggaccgattccatttaaaattagatccaaggtttgcatataaagttatacgttgcgatacagtgcttggtgtctggtcttgtattaaatctttaaagaagcaagaattgtatgttaatcttgaagaatttccagatggcgaacgaaatatgcctgatgatatacctagatatgtcccacatataacgtattggaaaaatgaaaaagatattctgacaacattccccatataacatgtatatatatatgtatatatatatgtgtgtgtgtatgtatatgtattcattctttttgttataatatatttcttctttgaccaaagacaatatgttcagaaccttgtgacgccccacccatatatccgtattcataggtggaccatcctgtaccattactattaccactattattgttagtactctttagatgatcaggcttacgtttaattggagggggcactcttttctctgctaattggggaccaagaacaggaaatctgtttggatgttttttattggcatatcttgataaggatttcaacgtttgataaacagcagttggatcctttgattcatatagatctattgtttgaaacaactcatcctctggaacaccatactgtctaacaaaatctagaaattgcgatatttgttccatttgcacaaaaggtaaatttgagtgtttccatgtaatgaagtttctttggtcttggtcattttcaaagattaaggtgttcgccaattgacaaagtatagtaccatctttcaaaagatctaataatggactgttagttggtcggtctttaattctcaatacactgtcaaagatccagtttttaatttcttcaattgcatcctttgagaattttgaagctcttaacaattttaaatcttcatctaatgtggtcacatcaggcttgatcccatatattttctccataattgaaacaatctaatgttttatatatttgtagcgtggtctaagagtactgaacaggatagaacacgataagggaagacatactcttatatatccatccatctgtcatcgtcattattatcattattatcactctgatcgctgtttatacttcaattcattaatccgatatttttaacggatcttgtgacttccacgtgatctgatagtgttaaatccccggccatcgactcttggatttcaaaggtctttttttttatttagttttccagtttcaagacatttcatttgagatacgattgatttccatctgtttcatttctagcccatgcagaattatggtgattcgatatattgcagttagttaatgttggtggatggaatgaggggcttggttttggagcaatataaacattttcaagacctgttgttaaattaaataggtatactagcagatggacgagcaaatgaatgagtgattaaggactgttatctgtttgcttatatgggactttggtgtgtctgaagtattattagaaattatgtcaaacaacaacaatatcaataataataacagtatcaataataagactaatgattatccaaggtttacacaaccatttattatacccttgccacccctactctctgtaaacaataataccaataatattgctagtcaatattgtcctcctaatgcgccgatttcattaaaattggataattctgtccattattcagaggctaatcgatcagctactccagatgctgatgttcaaattgtcaataatagtgaatgtacaatgaagaaaagaaaaagaaataggctatcatttgtatgccaggcttgtagattggctaaatctaaatgtgataaagctaaaccggaatgttcaaggtgcgaaaggttagagatacagtgtatctatgatactgctacacaacctttacctaaacatttgtcaaaggacttggcaattctgagattagaaaatgaagtcgactactggcagaagaaaactaaacttttattggaagaacaacaaaatttattgaatcaatatcaaattaaaagcaaatataatgaaaatgacactactattagtactattggtactattactaataataatactgatatcaagactgacactaataataatattattagtagtaattttagtattggtgatagtactgttgttgatacaattcttggacctataaattatgatgatgatttttaccataagaagatttatctaggtaaaaaaaatccaaggttaataatgtctaaatttatgaaaagggaggttaacccattatgtgcaaactatctaatgattaacgatattttcttcgctatgactttgatgtcaatctttatagatccaactattttaaaggaaaatattataagaaataatcttcacgccagcagtatccccaatagtcgtggtaataatacgagtaatgctgatgatagaactagtgaaaccgtgagaagttctgttaaatccgcttattctgaattaatacgaaatatgaatgcaaatcatttagtaagtgcacttactgtagacatcacaatggccacaagtggcagcattttaagggataatatttacaaattacaaaaaattttgattgatagatgtcaatcaaacaatttgacggaaattaaaaggattaaaaatttttgtaatagaatccttgaattatcttctgaagttaatgatatcacagatgtattgaaaatttggataaatccaaatgtcaatgatcatttggaagatataattaatctagaatatagtattaataagggagatggctccagtatggatcctacggtaaacataaattatgaacaatattattctccattattaaagcagatcattcaatcctttgaaactttattaccgcctttacatactattgaaaagtttaaaagatatttttatgagaatttatatcctttagtaccatttgttgatttgatcacttttgaaaactctctcaaaaagatattgataccagatccaaacaacaatcaaaaatgtaagttaattttaggagtttctggcatcagagataaaattgaaaatatatgtatattatcatgtattttaaagatttctttccaattcttctgtatgttagaagaaagaggatcttttactgaaaatttagtgaggaattatatttcattggaacaactacatcaatatccaattaaaaatgatattatagtcactgtacttcgttgtctaatatcggagaattggactaaatgtcctaatgaaaatataattacgatcacactgtatctgtggtcattttttatctttgccccagatgaagaaaatttttttgcacctaatccaacggagtttatttgtgacactatcattatgttatccatcaggataggtcttcatagagatccaaaagattacagtccactcgatggagatgataataggctattaagaaaccacagacggttattatggttatctgttctttccatgtccagttatgaaaatgcgttaaaaggtagaagagtatcggttagaaaacttctagattcatcgattgatatatgctctcccagcgcttttgagaattatatgaatcgtgtccgtgaggatttggtagatgacccttcattaaatgacattgtggtacctcttcatgagttgacttggaaaaggacaaaattggctcttttacatcaaaatcttaatactttaactataagttataataaggggatctcattatgggatatagaaaaggctatggcctgtattgatatatattgtgaaaagtatttgaatgtttcacatcatgatatcaatttaataaaaaccgaaaatcactttgttgaaaatttttacgatattaatgtttctaaaattttaccggaagcaagcttcatatctgaatttttaagcgtaacgttacaagtaaggacctcatatgcattgatgctttattttgaaaacctagaggacgaaaatgcaaatgataaagatggcaaagatgattataatgttgagaaggtggtgaatgaaaaacgttttatagtatcaaaaaaggaatctcatatcccttattatttacgttatttgaagatgaccataaattattgtttgaaattgattgaattatatgaagatttttactctgaaactaatattctttcatcagatagggtctcgttaaaaggtaataataatgtagactctaatattcaaccaccatatcatatttctaaatttttgcaagtatctttatcgactgcaatgtttacattactagctatcattgtgagaatcgctattaaccaaatttttttatcagaagacaataaatatggtaaaaataataaaaaaattgattctttggtgattgttcaaaatacattaagaactagattaaaggatatacatgatttagttacacatcatttgaaatattcatatttttcagtattcaaaatattatcgatgtatgatttattgattcgtagaattgtttgtgataaattaatatgtggattatttaaacccattacaaaaagagatgtagatccacgaatggcgaaattttttaaaatgtcgtttaatattccgtttagtgatggtaatgcaaaattaattgatattttaagaagcaaaaatcatatatcattgattgatgaaaacagtttggtccaattaccaacagaaataaaaagcaatcaaagagagacatcaaatctacatttcgattctagggaatcaagtgaggataccaacaattctaagaatgctttaaatcaagttatcacgacatctcaagaaccatacccattagtccctagattagttccaaccgttgaaaattcaacctctatagatcaagatagaatcaatgataatctcaacaatacaagcgttccagggttcttagatatgaatttagagatgctcaataatgataaccaatttaacgtagagacatcatctaatgatcaaaacaatactactccatataataattttacctttgatgaagaacaattatccaagacatttactggtatatttggtgatttagatctttttgattacgattactttttcagttataataataataatgaaatttgaaaaaaaaattctatttaaagttttagaggatcacaaaaaacagagataattatatcataaagcttgcttgtaagctatgtatgaatgtaaataaataagtaaagtacaaagtattattttttgttattattgatatatattcttatatataatctcttcatacacaaaatatgttttaatataagtgaattgaagaaattcttcaatattgggtgaatatgaggtgagtagaaactaaaaatcgatttagttcttaccttgattggcaaaataagtaaaccagtggatttgatcagctaaagctttttccttacaatatttgacccatggatcagagatatcacccctagcagcaaagccatgactgacaccagagaataaatctaattgatagcagttacccttttccattaatttggcttcagtttggtgtcttaattcttctgtgaagacaggatcagtttctgcagcagaaattaacagtgatttttctttagtgatagcagcaacttcttcaatggtgacaaaagaaggatgggcaacagcaccaacatcggcgagaccatcttcagccagttgttggatagcaaatttggcaccaaaacagtaaccaatgacaccaacgaaggatggttttttttcatcccttaatttttgtaaaaatggttgaacagcttcgtttcttgtcttctctggggaatgtttacttaaccattcctataggtgagtagaaccatctaatttaataacaggatctccgaataaaatatcagggactaaaacggatagtccagttttattagctaattcatcggcgatcaattggacgttgttgaatttatgaccgtagatatctgtcaagatgacaatatatttatcttcataggtaactttagtagacttacaacagtgggaaacctgaggtttggcaatataagtttctagaccaaagatttcttgaagggagccctttggttgaccttcgtggcggaaccccataaaacaacacttacttggtggatttgaagccattttttcttcttgttttacttattttgcacttttgtcgactgcaaaaatgtattacttcttattatcattggggagaaaacgaatgtttagagatataacaattacgtaaaatatattcaatttataacctaatttattatcgacttttcgaagttttagattgcttttttgctatttttagctttttcttagagaccctcgagcaaacaggcggctttttgttattcaaattatcggttttaaatgccgttttgcagcttttgtattccgcaagatttatttccaattttggaaatacgttccaaaggagaaataacgtgtttttgaagaatgacgggaagtaattttatcgtttcgaacgaatttgtcgatcgagtgtggcaagtctcatcctgtttctttttattttttaaaaacttggtcttaaataatacacaagggtaataataacaacatctcgatcagctttatttatacaaaagaaaaattagaagtgatccacattctaaacagtgtaataaagtcaattagttcaagattacataattctgtagttttaagtcgtatttttcctctccttttttttttcgactgttcgtttgttgaaagttcaacaaaaagcaatattggattgaagacgaagcggtgagacagattcttcgattaaataaaactatagtggaataatttagaaataatatttgtttagcatacttttagcaggatgacttcaattggtactggttacgatttatcaaattctgttttttctccagatggtagaaactttcaagtagaatatgcagttaaggcagtagaaaatggtgcaacttccgtaggtatccgttgtcaagatggtgtggtatttggtgtggagaaactaattacatctccattattagttccaggaaaaaaccgtaaaattcagacaatcgatagtcatattggatgtgtttattcaggattgattccggatggaagacatttagttaatagaggtcgtgatgaagcagcaagttttaaaaaaatttatcatagaccaattcctgttgatgcacttgctgatcgtttaggccaatatgtacaagcacacaccttatacaacagtgttaggccttttgggatcactgccatatttggtggtgttgatgacgttaagggtcctcaattgtatatgttggaaccaaatggtagttattggggctatagtggtgcagctactggaaaaggtagacaatctgcacgtgcagaattagagaaattgatagctaaacatacaaagaacattgatattaatgaagatgatactgataataaaactattcaattaaaagtacgtgatgcagtgaaagaaattgccagaatcatatatttagcgcatgaagataataaagaaaaagaatttgaaattgaaatcagttggtgttcaaatgaagagactcaggggaaacataaattggttccaaaggaattacttgaagaggctgtgagttttgctaaagaaacattatcccatttggaagatagtgatgacagtgatagtgatgatgataataacgaaggaagtgctacacaagataatgaaggtgatattgtattagaataaaggcgtttttttagatgattgacgtaatatccatggtatggaaatataagtataaatgattaagtaattcaaaatttaggagtattaacatgacatcaattaaatgtagtttgtcttaaagattataaatagaaagtgtgtaattttgtctattcgtatagtgaaaatattatattagataacttatttcaactaattcctaattaaattattttttttctatgtatatatgtgtgtgtgcaaggttaggtacagtgatataccattcgaatattggagaaattatacttattagttaattttagtgacttatataataagaaaaatatgagagcatgaaggttggtctatataagtatatgttagattcaaaaatttaaataagttcatttttaaagaacatccttttatttttaaattcatttgggtgggcacatcaggtttagttgaaacataaaagtattaggagaagctagaagccaggattgaaatagaaaaatatgcataaaggcgtaaagataatagcttattaaaaagtaaagatataaaaaaaagtaacgtttttttcgcaagactttcatatttgatagagagacatattcctcgtataacattcaaaaagtttatgggatccattttttttggtttatttttttatgatttatgaagagaagatagcgttaaagagagttatatattgaagatgtgctattataatataggatatattagtacttttagggcaagttcttcgtggctttttttttgttattttaaatattttaacttttgttctatcttagcaatccaaattataaataaaaaatttttttcctttagttcacaaaagatgacttgtatgaattatatagtaaggagttttctcaagtagtatactagaatatagacattaattacatatatacacacacttacaaattatataattgggttgattttaactaataaatagattagttttattattcgggttattcttcttctaagtgaaacctatcagatagaatacgaatattgttgaaatagaatgttctgtaataaaatagatagaacaataagattttagcagataccaaacgataaattgttgagtaataatcgttaataggtcaccaaaggttgttgagtttgtttaataaatatcttactgttcgtagaggaaaatggctgaatgttgacatatataaagccaaggatttcatcatacattatttttatcttatttacaatctttgtgtattattacttttatgttgtatatagagaaagaaagtgaagaactttattataattttgtatactaaatctgtttaatataatattgaaaatgtttactatatatccaatgactacaggtgctatttctcaacaaatatcaacactgataattacgtctggcattatctctcaataatcaaaggtctcttaaataagcctctcagtaatttgccaccaatatcaattcaacgattgtttgttcgttcaaatacactcacaaccttgaactctgagttttgactgttctaaatcctttacttcgatattcgacgttacttacgggttagatgtttcaggatgtctaattaagacctcttacagcctacctgacatagatatattatacaaaacttaataatatcactgaaaatcataatatcaaacttgaatctattcattgcaacataattaccatatcaaagtataaaatcttgttctcaccactattgtctttaaataaaaatactgaaacaggtctgaaacaatataactaacatatgttttttttcattaatgattactgaaagttatatttttcaaagtacaataaaatattatgtctaactgttgaattgccaaataattaaaactttacacatttgacaaattccataaaaattccacaacttaatactattacctttcttctttattaagtattgtactatacatttgtgactgaataaatagacttttttctataaacaacaattaaaatatcaatatattttctttatgtaagccctatttaacaaactagattacatttatatatgtaattctcctctgtaacttttttttttattttttgaaaatattaaatgcgacaatatgttttttttaaattattgttaaaactacataagtaatctaatttattgcgattctaatctgttttatcaaagaatatttccccaaggttgttctttaggaaaattttccttataaaattactcaataaatttaattacacatttgtaggaaggttatttgttgagaatgaacgcctgtagaaattggataaatagtttaaattctcaatgttatatttatatatatattgtacaaaattttgctcaagttcttcgatttttttatttatatataatatataaggataattataaaaaatgaacaagggaagaaccatgatatgaaaaaagtgttggctttatatattttcatatttggcatatctcgtctatgtacaacaccaaattattgatgagatttgtttacgtctactgataagcaaacaatatgtttcccccattttgttatcaatttatactctctaaaatctaattggtctatctgtttattctagaatgctcgatttcagtattattacacttcttacttatattgaacatttattacttctagttattattaaaaaatttctacaattgattcttcttgtttctgttaaccaaaaagtaatatacatgaataaaaacatgttataaaatgatattagtaccttaatattttgaatgtactttttatcccaacattataataggttccatttccaattaaaactgaaatcttacatacacaataaagcctatgcttgataaaatatctttaccataccataaaatacttctacatacttatcaacaacatggccatctttccatgataactactaataaaagaatcttatgattttttaaaaatttaaccgaacacaatcaaattcggccgacttatattcggccgaactaacctcccttccaaaaagggtaaacacaatacatgaaccataaaccatagaaataagtacgaggatacttcaattctctcgactttagtactacaccacacttcattaatgaggaagaacataactctattttcaattagctattgacaaaaaaaataattatataaatgtatgccatctttgggattcttgaatgaacagatacttctttataacccattctccttatatgacttcaacacaccaaaacaaacacaagtgcgttcttcaaacataataacgacttactattactttgatcttcatttacaaaacaacaataaaattaaaacaaacaaaaataaataatgagtttagttaaacaagttccatttggccaaactggcattaaaatatcgccaataattgtgggttgcatgtcctttggtgaccttaaatggcagtcttggacgatagaaaatgaggataaagtattcgaaattttaaagtatgcatacgatcatggtctaagaacttttgatacggcagatgtttactctaatggtaaaagtgaaagacttttaggaaaatttttaaaaaaatataatatcaaaagagagactgtcgttattatgacaaaagtatttttccctgttgacgaagatatgcaagtgacttatgaaactatgaataaggggttagatactgccgaaggtattcaattagctaaccaaagaggcctttcacgtaaacatatcattgctggtgtgagaaattctgtagaaagattaggtacatacattgatgtcttacaaatccatagattggatcacgacacaccagtgaaagaaatcatgaaaactttgaattgggttgttgaacaaggttatacaagatatattggtgcatccactatgcgtgcaactgaatttgtagaattacaaatgattgccgataaatataattggtttcaatttgttaatttacaaacacaatataacttattatatagagaagatgaaagggatttgatcccatttgccaaaagacatggcttggctatgaccccatggtcaccaaatgcaggtggtcaattaactagacctgtttccaagcaaaaagatactgaaaggggatcaaaagatgctttcttcttacctatgacagatgcaaatgttgagatcattaatagggtcgaaaaaattgccaagaaatataatgtttcaatggccatagtttctacagcatgggtattaagtaagggtttctatccaattgtaggaattaattctattaaaagagtagaggatgcaattgaggcatctatgattcaattatctgaggatgatataaaatacttagaagaaccatataaaccatctgaatatttactatattgattcggattcaattcctatatagtattttttctttttcttttctttttttttcaatcttttttttttcatatatctagtgtgattatgttatctattactaaatacatatatttttaataataagtatatcatcaattattataatgcaaatggaaatatgtaaacatgtttttttttttcattactcttatagacacattgtgcgctattctttattcatgtcatctgaccaaaaaaaaaagaaaggcaatctctcaggtaacattattaaaaatttcaacaaaataaaaaatagcatcaaacttatattcctacattcataaattatcaaaatgtttttttctgcccatatcctcaaagtttggtattaaaatgcaatgactaatagtcttttcattcaagcaaatttttagtttgtccataaatcataacaattaataagatgaaatatagttaatatctagagaaattaaaaaagattatctccagaaaagtactcgtactattaacggttttcaagcttgtttttacatattcctgttaataaaaaagtatattctagggttttccttttttctaagcagtgctaaatttttttttacattccgggtaaaatgaaaatttttcttttttcaaatctcgtgacaacaacaacacaacaaaaacaaaaaaaaaaaagaataaagagttatttattattgcttaacgtttgatttcacaaataaaatctattgaataaagacttattaccggatattacacataaactttatataacactgaacacatcctgtctttgtttgaagtatctcacaatatagcaatcatacatctatatacaccatgacaactgagatttttgaagacatcaaattggaagacatttctgtcgatgatattgatttcactgatttggagcaggaatatggtatttccgcctctacttctaccaatgatgaaattgacaattttattcattttgatcactatgtcgttgttactggtgctccagttattcctgaagccaaagtcccattgttaactaaagctttgactggacttttctctaaagtagccaaagttgtcaatatggaatttccaattgatgaagaaacaaaaaagactaaggggtttcttttcgttgaatgtgaatctaaggctgataccctaaaaattattaaggcctatcacacaaaaagattggatataaaacaccgtttattcatttacactatgcacgatgttgaaagattaagcaatttgactactgaggaaaaagaatttaaggaaccagaattaccaccatttgtctcctctggtgaattaaaatcttggttattagatgaaaatgttcgcgatcaatatgttattcaaaatgaaaagttgactacagtcttttggaataatgataaaaaggatgaagtcaccgaagaagctgttgttgaatctagaaacaactggtcaaacaactatgttagattctctcctaagggtacctacttattttcataccatcctcagggtgttactgcttggggtggcccacattttaataaactaagaagattttatcacccaaatgtcagaacctcaagtgtctctccaaatgaaaaatatttagttacattttctactgacccaattgtaattaataaagatgatattccagaggatattgaatgcccatttaccatcaaaaatgaaggtcatcaattatgtgtttgggatattaccactggtcttttagttgctactttcccagtgatcaaatctgaatttttacattggccattaatcaaatggtcttacaatgaccaatactgtgccagattagttggagacacattagttgttcatgatgctaccaagaattttgccccaatggaatcaaaaaccttgaaagtttcaggtattagagattttgaatttgctcctactgaagtacagttattgccaatcagatctaacaagccagacccatctgtcttgcttgcttattggactcctgaaacaaataacatgtcatgtaaagctactattgtcgatgtcggtagaaataacggtcgtgttattaaaactgttaatttagtccaagtctctaatgtcactttacattggcaaaatgattcggaatatttatgtttcaatgttgagcgtcataccaaatcaaagaaaactttcttctccaatttagaaatctgtaagattaatgaaaaagatgttcctgtagaaaagattgaattgaaacatcgtgtggttgatttcaaatgggagcctcatggaaagagatttgttactatcgctcttgatgaaaccaacgacgacgataataacaatattgccatgccaagaagtgtggtacaattctgggctccagaaaaggttgacaaaccaaagggtaagcaacaacaacaaggtagtgttattgttaaaaaatgggtaatgatcaaagaatatgtcagaaaattctccaatactatttcttggtcaccagctggtagattcgttgttattgccacattagttaaacctaatctaagaaaaccagaattagaattctttgatttggatttcaacggtgagaagaccatcaatgattcaaatatcaatgtgccagttcaagctcgtttgaaggacattgcacaaccaccatgtggtaatgtcactgatatctgttgggatccatcaggtagatttttagttgtttggtcctcagcattgaaacataagatcgaccatggttataagatgtttaacgttgcaggccaattattaagagaagaagccattccaaatttgagaaatttcgtctggagaccaagaccacaatctttgttagctagtgctgaaaagaagaaagtaaagaagaacttgaaagaatggtctttgcaatttgacgagcaagatgctatggaagctgacactgcaatgagagatttgatcttgaaacaccgtgaaatgttggctcaatggagtgcttatagacaagaaaccgttcaaaccttggaaactgaattcaatgccactgtcaacaaagttggtgctttggttccattatctatggacggttctgaagacgacgattatactgtcgttgaagagatcaaagaagaattaattgaagaaaagagagagcgtgtttaagagggatgaggtaaaggttatctatttcttatttatttgtctttgaaacgttattattgtatatttgtatctttttttttaattattataagtaatgtttctttgtaacatctgaaatttctcagtatatttattttgctcatataaagataaacatcattaaagataatgcagcttacaggttgcttttaaatctgaccattttcaatctgtccatacgaattgtataattaccgcatagcgaatgtgtcacaaaataaatatgacgtaaccaaaatactcgaaaacagaaatatttttgtattctttttccaaatttgtgacactttgtgtgagaaccaaccaaaaaaaaaactaaaaaaaaaaagaaagaaaatttttcttggagaaaaaaaaagaaaaaaagaaattcctcgagaaagaaattaagataccaggaaaaagaaaaaaaaaaagagagaaatggtgcttgaaaaattaaatacgagataagaacaccttacaaaacccaagagtaactagagaagtaaaggacggattttatatctacttatatgtatccttccaacaaacatagcaacgttattccactctcatagattcagtctttaaattaattaagattacaatattacagtatttgtgttttgtgtcctaagtttacaacgaacatagataagataatatacataaaattacccattatatcttaatttttttatattaattagaacagtgcatagagtgatttattcattcctttttttcttttttttccatcttttgattccactaataagtgccccttttattatatcgaaagattaaacccctggttgtatactaaatagagtcatataacgtaactttatttctttttcattttctctctacctctctcgtgcattagtgtcattaataatattattattttattatactcttattgttaagtttagtaattagacactcacctatttacaccatgtccacattatttttaatcaattgtaatcttcagaaattaagcttcagcgactcgaactttattgaatctaaattccaacgtgttttagaaatgcctactcctcaacaattattcgaaaaattctatttcgatagaatccagaggtttcctaataaatggaactacgagactggtgtctctttaatagtcttaggtaatacagagtataatattgaagactttttaactattcaatacagattcttcccaacttttaatctgaaatttgtcacactaattgattttatcataaattggaaacagattattaagcgaattcaaatcgaatataatttatgtaaactaaaaatcaaaagaatgaaccattggatgcatcatcatcatcctcatcatcatgatcaccatactactcttgtggaaggtaatcataaagatgagagatgtgtgaatacaaaaatggagaataatgatagttcaaaagcttacagaagttgtgagtatagtatatatactatgttggaccatttaactaatttaaggagtgcaaataatagatcaaaatgtgtgataccaaaagtgatttgcaatatcgaatttagtgcaattgtgtcaaatcttgaaaaggataaagaatctttaccacacagtttagaagataaagatttttatttgaaacttttcaattcctgggatttttctgcattgaatttaactacaagagaattaataattggtggatactttttactaaattttttggctcaaaatgccaaaattgaaatttcacaaaataaattattgcttttattgtttacactagaatcctcatatcatcaagttaataaattccataattttaaacacgccatagatgtaatgcaggccacttggaacctatgccagatcctattaccagagaaccatgaactgacgttactgttatgtctcgctgccattggtcatgatattggccatccaggtactaataattccttgttcagagatgatagtgatttatctatatcgttcaagaaaacttcaatactagagaattttcatttccagactttccacgaagttattaaatcaatctggccgcaagtatttgaattatcagttaaagatgcaactataagggaaagtaacgaagatattacaaagaagataattttggctacagatatgagtctgcatgataattatgtcaatatgttgactcaacaaaagaaatcagaaataaccacaatggaaatattgtcctttattatcaaagcagcagatatatcgaatgtaacaagaccgttaaatatatcagctaaatgggcatatttgattacattagaattcaaagattgttttaatttacaaacttttaaccaatccaataaaaatgaagacttttcttgcggagacatacccatgatgatagatcgtgaagctgaaattgatgaagatatgaattttgaaatcgagctgcataatacaattataaaagaaccattccaattgtcgcttttacttaagaattatccaatgatacctaaggggcaattatttttcattgatacctttgcatatgattttttcgataagttatcaactaaattccctgaattaaaatttctcatcaacaatattaagtctaataaggagttttggctatctaaagtagagtgaaagtgtgtatatgaggttttaaaaagatatcattatgattattagtattattaattttacaaaatacttcgaatttatttaaaaaaattatatacaaagataagcagtgtgctaagttactgggaaaataaattaaacaaagtatcagcagcagaggtgctaatgataacacctggtttgtattgctttagtctttttcattttatttttcttttgattcattatcatatcacaaataaacatacatatatacatataaattctgaacactcgaacatatatatgtatactgtataaattattcttttataagaatcaattgtaaatgacaatcatttatttactttgatatgtatatctaacaagttaaattaatatataccgaaagtttatttctactaactatataatataactttaattcaataagcagatttatctattaaactctgttctttgcaatctttaacgatattaaacgctttcagtagttttcttcttgctccaagggcactaacacctttggcttccaattcttcatcagtcagataaattaatgtataccacggtaggttactcaaacaattagaatatttatgtagtctcaatgattttaaccaagctggaatatttttcaataacgatgggtcacataaattttcagatgtcattgagttatttgttggagcaacagaatgattatttgtagtagagctagaatgtctattattattattactgttattgttattgttgttgctcacaaaggtcattacattagatttattattgtttgcatttgaaggagatgaagaagattcaaaagaatgttttgaagtggtctgttgatatatatttctctttgtcatcaacattccaggatccacagatttagatctttccacattaaatgaagaatgctttcgagatactggctgtggggaccaaggatgataggttgaattattagtatttgttccactaccactactattactattattattattattgttgttgttattatagtgattgttggttttactttgtgtaatatgtgctgcattgttagaagtaataaactgtgtctcattaaataatagagaatctagttttgaaaattcagaattgtattgatcttcaaggagagaattggaaattttactattgttgacagtagagagggatgcggaatctgcaaaagacatattagtattaggagattttaggacagaatctatttttgtttttgtatggaaaagaatgtcgtcactcaaaacagataatatattatcaatagctattatctgttgttgaacagataaatttttcatccaatgatttatacatctgatatcctgaagaaatccagttgtattcgtgtcggtagaaagaaatatggggatactaatagtgccattatcgtttatagatggtacatccaaatattggttattgagataagatggatacatttgatctaagggataattggcattaatagattgttgtggtaaaggagatggaacatgtgaaggaagaagagtattataacttgtattattattattattattattattactaatggatgttgtattatatggtatgtcaatacatgggacataggaagcatgcttagatgcagacgataatgggactggatattgtattgaaggcaacttagttgattcataagtaactttatctaacatatcatcaaatgaaagcggatttttagtattgttggaattatgattagtatttgtagtatgattatcattacttttggagggaaaataaatagaattttgtgattgattaaaagaagaagaagtcgatttagaagcagattgtggagacatcaaaactactccagggtatgcatttctaccaaatggagactgtgaccgaaaattatgcgaaatattatcagagacactattattattattgatgttgttgttatagttatagttatcagtagtagtgatactatttaacatattgattggtgaagtagtagaattattaacaggaagaatgcccatttcaaactgatgaatagattgtagaaaatagagtgaacagacaatgaaacagaggacttagattataataatcaattttacacagaaacactcacgtacaaacaaatgttaacattcctcgaggaattcatccgttctgacttgtagatgtacttttcaatgtgatcttatcagcatctgcagcctagttatcatcatcatcattatcatcatcatcgctattcctctctctctatctctctttcttatatttttataaaagatcgatggaaagagcatcgatccgaaatttctggagcaaaaagagagaacaaagaaaaaaaaatttttttccataaaaagaaaaaaaaaaagagaggaattaaataaaaaaagaaacgaggccccgaaagagagcgaaatagtttatggtagcgacagtaagggaagaatagatgatagagaaacaaaagtatcgacttaacagcaatcaatatacgtagccctacatggctggtgatttcgtagatgattgagatccagtttagatggttgctgcatgcttcattgtcttggaacaacatcgatcaaaaaatcgaacatgtcactttgttttagtgcctctgcaatgtcaccacgttgtagagtacgacgcttatgagcttcactagcacaccaagctctcattgtgacttcagtgatgaaaatttcgcaagccttggcaaagataaccggggcttctgcgctaatcattctgacttcttcgtctgtcttcatcactttacgtattctcgcaaagggcaaagagtgcgacctaaaatcttcctcatggttagagccgggttcgtttattgcttctatttcattgaccagctcctgccagtattggatcataatctcgaggtagtgaccagtcaacccctgaccaacatttctaaatacatcataatcctcttcaggtagttcaaaaacttcttcttgaccctggtattgttgttcttcaatggggatatcaaacttttgttgtggatttctatgttcttcaagttgttgttgttgttgttgaggaatatttacagaaaccgtgtctaaattttctttatttactgttgtgtctatctgttgttcagaacgaaccaattctattaacaaactggtttccaaaggaggtgcaggaatatcctgaaaattctggggttgttggttctcctccgagatatttgttgtgttagcgttgccagtattatccatgacgatatgtgtttactgttttttttttttttttttttttttttttttataatcttttacatggaagatttccttattgaactgagacacttgcaagtacattcaaaagtaggaaggactcctcttttccttcttttcaatcaacagtattcattcttctcgactgagcccctttgaatttcttttcctttcttcttcttactttattttttttttctttttcttttttttattttgtttccaaaaagaaaaaagcattatgcaattttgttaattttgctgtagaaaagcattggaatacattgaaactattgaacaagagaaaaaacatgtagggagagtgaagtattagcattagtattggcatttgtattaatattagtgtgattatgatcaagtaattgaatgttttaattattgtcttttctttttttttctttcctttttttttatatcattttattttctggaggcttgtagaagattgttccttcttctattgcatatacgtatattattacctatctctctatttacgaatgaagcaatttcaatctttcagtacaattgctaaagaggctctattagattcccctgacctaactgctcgacagaaatcaaattcaaataaccatgcaacagtaactaatactatcacaaaaccagcatccaccacacttgaatctgatagcgcaaaagaacttgatccaagattggataatgtcattacaaattataacgaaacagaatcgtttattgaagtagatatcattaatccaaagatccatgaaccaataccccacaatgatgcaagtagtaaccatacaacattcaatagattcacagactatgagattgtgacaagaacgaatctgccccagtttcctaaaagaatcagccatgtacgtcgtagatattctgatttcgaattgtttagacattttcttaagaaagaaatccaactgaatgagagattgaataagattaaactacctcatttgccaagcaaattgatctggcagaacagattcgatccttcggtaattgaacaaagacagaaagatttggaacaatggatacgattcgttgctggtcatcccttaattcagactaattgtccaactttgattagattcctacaacaggaaaatttcacaggttaatttgaaacatataaatactgcatattcaacatatatgcatttaaatatccatcatatatatatatatatatatatgtagtaacgataatgagaattataagattatgacaactttttgcactgccacaattttgaagttagggctttttctatttttttgctttttttctaatgttttttctttttcatcttttattttattttattttatttttagcccttgaagcaatatactaatactaacatatatatatgtagatgaagatttgcagaccgtcccgtttctaatttaggaatattctcagtagcttacggtattagtggctttttcttccttggctaaccctcctgtactgactttttgttttgagacttctagacacttgaagcacaagtgtaaatatggcgttggtatcgaaatccagattaatttcaatagatgcattctataaggcacaggatgatgttagaattagaactaagacaggggcatggatgactatctcctgtctttttgttactttcctactactgttaaacgaatggatccaattcaaatcaataatagttaaaccagaattggtcattgatcgtgaaagacaattgcctctagacttctcaattgatattgttttcccaaatataccttgtgacatattgacttttgatataatggatgacatgggtaaccttctcatttttaatgacaacccagattctcagtttgttaaatatcgtataaacaacattggtcaggaattgggggaatataaacctgtcttggccgagtcctcttctatcagtgataacaataacaaggacaagtctgcatactgtggttcttgttatggtgccattgaccagtctgctaactctcaaaagagtgatcctaacgaatacatctgttgtcaaacgtgttttgaggttcaaagggcatatatatcggcaggttgggcattctttgatggtaaaaatattgaacagtgtgaaagagaaggttatgtctcgtctttacataaacatttaaatgaaggttgtcgtttgaaaggtgactccaaattgaaacgtatcaatggtaatatccattttgctccaggttattctttccaaagccttaacggtcatttccatgacacttctttatacgacagactgaataatatcaatttgaattttaaccacatcattaatcatttaagttttggtccacaaatcgcaaacatcaataataataaccaagagcactcattcttagtccaaaatgataatcataacattctatctgtcgcaacatcgtcattggatggcaatcaagtgttaccagattacaattctcataattatcagttcaattattttattaaaattgttccaacaagatatgaatataaatatcacacaaaaaaaatcattgagactgcacaattctcttcatctttccattctaagcctgttaccggtggcattgattcaaatgatccctctataactcatcaacgtggtggtacaccaggtgtttattttaacatcgaaatgtcccctttgaaagttattcaaagagaacaacataaaatatcttggtctgggtttttcttaaactgtattaccagtattggtggagtcttagcagttggaactgtgtttgataaaatcatatatagggtacaaagaagttattcaacttataaaaataaataataaaaatatttaaaaatctaataaatatatcaatgaataaataatatggtaatgaataaataagtttctgatcgttattactataggcaacgaatattatttttcactttgttaacatttcatatctaatacatcctttgtctttttatatcaaaattttgattttcttcgatcttctcaagtagaagaatattttggtccatcattaccttctggtacaacccaattagtgttaccagtaggatccttgatgtcacatgtcttacaatgaacacaattttgtgcattaatcttgaagttaccttcttcagtgtattcatagacacctgcaggacaatatctttgttcaatacccttccattgtggccatgatttctttgcatggctttctagatcctggttttcaccaatacgtaaatgacatggttcatcatggtcatgatatgtaccagtacgtgaaattgaagtcataatatcaaaagaaattacattatctgctttagggtattcaatcttcttaaaattcttagctggttcagtgacttcaccatcactgatatatttaccattgttagtatgatgagagaaagtccatggtactcttccctttaaaaacatagtatctaatccagagtacatcataccaccatacatccccagtttagtattaaatgctggcctgacattgcgcactttatataactcatcccaaatccatgatttcttgatagcagcttcatatgaacctaattcaaaaattgatggaccattatctttttgattcagaacctctacaacattagtagaatccaactcaatgttgttcatctcacattcttgaattaaagtatccatggtcttaaattgtcttgcttccaaacctttaaaaatctcttcagcagctactataccacttttcattgcagtatgactacctttaatctttggaacgttcatgtaaccaacagagtcgcccacaagaataccaccagggaaggtcatttttgatgggatgctttgtaagcctccctcgttcaacgcacgagcaccatatccaatacatgttccaccctttaatacattcgcatagtatggatgatgcttcagcttttggaattcttggtaaggagagatgtatggatttttataatctagaccaacgactaaaccaactgtaactaagttatcaccaaagtgatattgaaaaccaccaccataggtattataacttaatggataacccatagtgtgtgaagtatatccgggtttgaatttagatggatccaccttccaaatttcttttataccaagaccataagtttgaccttggaatttggggtcattgttttgatacattttgaaatgtttgatcagctgtttagataaagatcctctacaaccttcagaaaacacagtttgtctagaatggaattgtaaacctttttcaaagcgatcatctcgcggttggccatttttatctaaaccaaggtctcttgtagctacaccaagaacagatttttgatccctatcatagatgatatcagagactgcaacaccaggatataattcgacaccaagcgcttctgcctgttcacttaaccatttagtcaattgactcaaagaacatatatagtttttgcctttattctgtagatcagatgggataggaacgggtatagacaaagttttgttaagcaataatttgaaatcatcttttgtcacaggtgtcaaaagacctttacatggtaaagattctcctggaaacaattctttcaaagcttttggatcaataacgcaaccggaaacaatatgattaccgaagtcagcactcttttctaatacaacaattcgatattttttctctttatctatttgtttcaatttaatagcggtagctaaacctgcaggtccaccacctacaatgcaaacatctactaattcaacaaaacgtgggatgttagcaacactgctatagtgtcttcgcaaaagagaaaacattataacgaattacttttataattataatatcaaatatttttgccctaatttctaatggcaaaagctcaggcagttttaaagaatgactaaaacagtagatatgctagaattgagggttaatttcagtacggaaggaatattcttgacagatccatttttcctgtatttacattgtatttcaattatatatatttacaatctataaattcacagaaaagaaacaggaaataaagttaaaagaaggaaattcctcgaggatttaaagaacaatagaaaaaatgtgactttaaaggaaatggataactcgtttctatcatttttcacgataaaagacggagtcaactaacttttattgtggattgtatgggtgttttagaataaagtttttgtgtatttcgcttagttatcaatattattaatcaccagtatcactcatagtataacgctgggattataccataaaatattgtggaatcaataactgctcaatggcattgtcaaaagtcatattcaaatagtccaaatacataggtataacacaattatataaaatagtgtgacaatatggggagagaaagttacatgttgaatgttatgcatacaattagcaggctatataacaattagtcttgaacactaaaacatactatccaagtcgtctattgaaattgactctggtttactaatgtcccttgtcaagaatccacttctaaccatattgatccaatactcttctttatgtttttgttcctgactttcatcgttgtaattgttattatcattggcagttgtatcactacctaaagtgacagtgccaccgttgtttttctcagctagtttactttgacttctagaatttaatataggagtctgtagtgttaatagctgatggatattggtggatgaattgtttggagtagaaaaattacttcttggtaaatattttgatattcttggtgctgcagctacagcagtgatataattactttcactacggtcagaattcgtaggaatgtttatcaatccgtttccgttaccactgccattacttttatcattgtttatcgtggcaactgtagacacgattgtggattgagaatctgtggccatactttgatttgttgaaatggaactattagaactatatgaagaatctatatttgaagtctttggtctcttatttggagattttatactatcattattttttttgttatttttgtttgtcactcctatcgtggtcatatcattagctgctctcttttttgtatttccttgagaaccatttttcttattggatttcatagcttcattaaaactcatattttcattatcatggatattattaatcaaaatgttgttattttggtcatagttcatattgatattattgtgattatcttcatgagatgtattatttaaagtagcagaaacaggtgatgtggaatatggaatattaaattctggaggaaacgtaaaatttaaattattagcttgtctataattataatttgtggcatcaaaacttgtaagatcgacattttgcggtatattattgaatgaagtaatcaaattattattattattattgttgttgttcttaccattattactgttctttttgttcgacttatcgttgttgttatttttatcggttgatgtcgttataatattagcagccatttgttttttcaatttactagccactaattgggcttgttctttataatctggggccaatatacctctatagatatataacatccttcttggagaagcggcagaccattccctagaaatagcataaatcaaagtcttttcccccttttcgatttttttaacgtaagcattcaattttgcagatattagatttgacaattttgtagataaattcgacatctcgggatgttttatcagcaagtaatcacataactgtttcactgtcataccattttgttcaggatccatctcatacaatataatgaatacagcaaatagaacatcatcgtcgaactgcgtcttgtcttcaacaggtcttggtctttcgcctgttacggggatcagcttagagatttcaacaattggattgtttagaggattattagaaactgcagcctttgtgttgtttgatttttttgaagtgctagaagagctagaagagctagtgacggttgttgaagtagttgcagatatactgtttatattatttgttgttgacaaagatagagagtttttatttggacctgccgatgaggtagaggtaggggttgtctgtgcggttgtgttaagatgagtcattacatcgttcatggtgttttcacttacaggtgggttgatatcattgatatttacgatatctgaccctgaggaaagactgttatttatttctggaatattattaacactattggaaccggctgtagttgtattagccattttattggtgatgttactgattggagatattatactgctattattattagtagtagtagtggtggtactgttgctattgctactactgttattgttggtagtagtagtagtaccaaaagcagaagaaggagtggtgctattattaggtgaattagaggtcattgaacctgccaatgaaggagtcatactaaattgaaagattggcgatgttgaattatgcaagatatcatttttaccgttatccagtaaatttaatggtctagagtttgttaaagccatattttcataaatggaagaatctagaagagtgtaaccaggtctaaatatatatgcacttttttttgttaaaataaaaaaaaaggacgatgttccaatgaaagaggtgaagaaaaacaaaagggtgtctcttatgagattaaaaatatgtatatgtatgatatatgtacgtacgtattgtcaatctctgatttattgttctaactaaagagattaaggtaatccccaaacttcaggcacagtatatgcgggcaatataaaacgcacttctcaatacagcaaccgttgacagaaacaatagaacacgtaaccaaaaaagtaggaatcactctattttcagcgaagaaaaatgttgttcaattttctcttcccctattttctgttttagtcttacttgtaatgaagacaacaaagaaaaaaaaagtccaaagggtagaaaataccaagatagttacacaaggaaaaagaaaaaacaatgcaaagaaagaattggaacataaaactccgaaacccctgacgtatgaaaagaaaagggcgagaagagagatgaagaggtgtaaggctgttgtgaaagtaaaaccagattgacggcagctctgaaagccaaaaaaaaaaaaatagaaaagaaatgagaacatccggaggaaaagctgtagggttaacaaacaattataatataaactgttaacagagagagaaaaatgatggaaccagaacaccaagagaagtccaagctgtaaatagatggacggaagaaagacaagaagcgaagacgtggactcgaaaacataaattaaagataaaaaaaaaaagaagtatacaaacactgattaatcttaccttgaaagttagtagaacagatacaaacttggacgcctgtctaaaagacacctagctactacgacttgaaaccactcacggtacgacctgttttctatcaaaaaacaaagaatgaggtctacaatttcctgttataaagcgctagggcttccatctcttgagtgggaaaggatcgacttgcaaagagcactttagaatcggtggaaatctcagccaacgagggccattatagagcacatctgattaccaaaaagtcataggattaggggcttggaggtggagaggggagaacatagctgattctactttggtaaaaaggaatggtttgtgagtcctcttggttggacttggctttctcctgtctgtaagctttctttcattagattctagaaagggttacctaaagcaaaagcaaatgcgtgttccttgaagaaagctattctttcaattctttctggactgaactttatcttctcctagaaacgcttctcaagaaaatctgtgaatttttctgataatataagtttcacaaattaaacgtacagttcattctaaaaagggaaagtaactcaaacagcaaaaaaaataaaacgtaaaacttcccaagactgtttttgtttttttttagttttttacaataaacatccgtacatctgtagatatatatatatatatatcacatacatatccatacacaatgaggtgtaaggttttttgattttcaaaaaaaattgtttttatcttttttttttgtttttttccgacaggattattatttattactatatccgtacacgctttgttggtattgtgtcagaatcaagattggcacgtttttcagtgtcacaaaatggttttttctttgttttctcttgtgaggacaagttacttggtgtagttggtgtcataggcaatttataattgactgtattggatgcttgttttgtagttgtagattgtggtgatgttgtcgtggctgatgcgtcagtaatttctccagaaacatgaacttttccagtttgatctatgaaataatccttcaggatagtaaataaaatgttctgtttgtatttcaaacgtacactaaccgggaattcaaaatttgttgcaaataaatattttctaatcttgttaaatatagagatatcgtagtcgttacgaaaatgggttgtgtcaggtgggcataattttttttgttcataactgaaacggttgataaccagtgcgatctggaaagtacattttgcgatttcttgtaaatcatattgcatcgataaatggatatcaaataagcataattcgcaaataattagcatccaaatcttgatactatttatatcgtttcctagttcttgcaagtgaggaaacagtaacgcatcgatataagtgtcataggtgttacttgattggatgttccatccaaggttacttagaatgataaattccagggaacagatttctttcgaatcgtatctgtactgggtcaattgggtcagttgagatatggtgggggcacgccttttcaagtcgtggaacttagacgcaatccaaagtgagacaatagcgatcaatttatagttataatctttgatgatgtaattagatgagattctatccataatagatatggattggaatagagttggagtagaaagtttcaatttcagatgatatgtgatcaacgagtcgatcatgcgagacctcaatctggagtcgatgtgcggctgatccaaaaaattttgcaaatttaattggcatggcgatggcaggaagttttggtttgtgaatacatctttagatagatattctgttattgaattttggtggattgataattcgtgattaattagattttggttggaagattttatggaactgatctcggctcttttcatggctaaattaaataaatttggtaaggccattttccaaagatgataaaaagaacaaaagggaaggagaaggtattagagaaatgcaattaaataatatgataatgaataatgaataaataaagaaataaaaaagatgcgaatagaggaaaaaaaaaaggagaaggatgagggatgtgggaatgttaaaataagaaaggttaaaatcgttaaaaattagatgcaatcaaacagaattatgcaaaatagcggtaatatatgcagaagacaaataaatggatggagaggatagaatggataaaaaaaaaaaagaaaaatgaatgatgtgttatgaataaggtataattttttttttgttttttcaatatgcaaatgagatgttttaataagttagtttttttttgataatatacatgtatatataccaagtatatgtatgtatatgtattctaacctaacaaaaactgatctaatgcattgaaattggtttgtataagtgtagaagatcaaataagaaaataatatattgatttatatttgtttagaatatcatttaagattctctagtgtatttatatatatatatatgtgtgtgtgtgtgtgtgtatgcatatatgtatatgtatgcggaaataattaaaataagatccggatttgacaagatatactactagtatgctttattcttgctcatctactttaacaaatctcgaaaaaaagaaaagaggggagggaaaaaaaataaaacaaaagaagtgatttaaaccctattcaaatctacaataaaatattaaaccgaatagaagagtagtaataaataactaagagatgagaatatagaagatagctaaaacaatgcattgagatcaaaataaatcaactataataaagtggttcccgtgctagacaaaagacaatcaaaaaagaaaaaaaagaagaaaaaaaaaaaagaaattgctactcaaaataatattggaaggctcaagaaagacaatagtcgtttgcgaacaatcacggtaataataatagtgataaaataatagtgataatagtagcaatgaaaaataaaaatagcaatagtaacagcaatacgatggatatactaataaaaacatggtaatgtgcttaaaatccaacgttttaagtgcagtgtgcgaatattttgtttctgtgatgtttgtgatgtattatttccctctctcccttcctttgctcttgtaaaaaaggaaaaggaaaaaaggaatcctaacggtgggatttccaccggcaccaacagccagttttgtggtttgtgaaagaaagaaaagaaaggcgatatttgttagcgctaaatgcgaaacataggcagccgttttaattttctttattttttgcttttgttttttttttttttttcttctttttttttagcacaagggggcagagaaatgagggaaatgagaaaatggggcaaaggaaaaaagtttcctaatatcgtaatatctaatcaaataggtaaaaaataaaaataaatgaaaaaaaaaagaaataacagaaatcatagttattattagagaatactaatatatagtggataagatttgtatgtagtgtgatcactatatctactgaaaatatgtttggatatttttcttgtatatgtgatattgtatgaactattctgagataatattaaaacgtcgtgttaaaagctagaaaaaaataaaaagaaaaagaaaatcacaataattgctttctttcttccattatatctttctttgtcgggctcgtcttccaatcaccatggtgtatactactgtatttgactactgtatgtgattgttacagaagaggcaaattacaaggcaagactgataaggcttagatttcacaaagaaacctttggacacttgttttaatttaagttacttgttttttttttcatttgcatggaggcgaagatgatggcaagatgttacaaatgacggtaaatgatctgttcttctctccttcttccttttgatcctcataatattcatcttgagtaatctggtctcacattaacaagtatcatttagtatatcacagaagttaccctcttatccttttccttgtttgtttgtttgtttgttttttagattccgctggggctttttgggagtcatttttgcggaaagaaaatattccgctggtaaccgggtaatctatttttttttttttctgattatggagggaacaggaaaaaggagtggggggaggaaaaaaaataatagaaaactggattaacaaataacaaatgtttttaaaggatagttggtttggaaatcttgcattaaagggaaactttactcgtcaatatgggtttaagttaactattctatatctatacttaaagatatcctcttaatatcatcgcgaattctttttttttttttattttgtttacatatatgtataagaaaaaaaaaattagaatatgttgaatgccaatagatatattggatttagatatttgaaagggaattcttcattaatctcttctacaagattctatagtacatccttaaaaagtcagataaatgaacatgtaaataataacaacgatattaatgataataatgatagtaatgataatagacgtagatataatcgtggtggattcaataaacaaatactacaattaaatgaacaattatctcaaagattgagtcagtcaaaaaacttatcagaatcatatcaaatctttaacgatctgatattgcattttgaatctaaatataataaatcacacatggttaacaatggacattccatcttcaataatacaagatatttgaatacaacattgaccagattatttaaacaatctctattacaagcagaaccacaggttgatccataccaattgctaaacgattactgcctccatcatttggctcgtcctaaccactttttcacactgatgaagcagtacttgatagagaaaaggtatcaagacgttctaagtctgtgggttaaatatttggactctttaccaactttcaggatcgatcaatttctctatatccataaagggatccaaacatatacaataattgcatatttgtcactgaacagtacacaatttacaccagatttgaaatatttattaacttttttaaatattcaagatatcgatattgtggacctgtatgaaagaatcaagctatctaactttattactggcactggtgataacgctaatcaattcatttggaccaatttcgattctcttttaaaacagtacttacatctccactctaaagccttccaaaaaagaatcaaggattccattaatgtctcggagctggagtccatgtataagatttatgaacgctatgtggcaggagacgacacaaaacctaacgtggacatattaatagcattcgtcaaaagatttatatcattggattctgctcctttagcaatgagagtattcgatacttttaaagaaagaatgattgatcctcaagaaagactatctcttaataatcaattattgtacattgtttctcgattaggtggtggtagaaacagtaccacaaagagacaaatgattcaagctgtttggaacacatatttcaagatggaatattttcaaaaaccaattccaatcgagtcctactgttcccttttcgaatctctgactgatgcaaaggaattcaaagtacttgaaaatatatgggatcatgaattaccagccagtgtgaaatcagaccatacaatcaagcaatgctatttatcgtgtttcttgaaggataaaaaacaagaaatgacatatgagaatatggttaaaagattgaaagaggaatcagtggttcagtatccaaaattaatcaaaaccatattattaaatattatattggatcccaagacaaagaaggagcaatatattgaggcatgggataagtataagcaagccattgaaaataagattgattctgattttgtggccattgatatcttatcaaactaccgttactctataaacaaagatgacttcaattttatgcaagctttgaataatgataaacatagccaacataaaccattagtcattgaaagttttattactatgatacctactattcacccaatacgtaaaatgtatcatcaactaaagcgatacgaaaatgatccaagtatcatcagaatgtttatcgacgcagagtttaagaagaattcaggtgatgtaaaggtagcagactccatagttaaggattatatttttaatgctacttcagaattaagagattatactcagttaaatttggaggaaaaattaaaaattaagttgatattagattgtataatcaccaattgttcacgtaataacgctaaagaagatatcgatatgatattgaaatatataatcattgcaaatcagtggtctataacattacaaaattcaacaatctatcaagtgattagacgtctgaagaaactgaaagttacaaaattaccagctactacgcaacaaaatgtgagagacttcttaaaactcataacgagtaaaaaaattagattcaaattgaatgacgaggatatgaagagatttaaacaaatggggttattacaatgagaactaatatagttgacttctcttcctttcttttctctctctttcttcttttttttctttgtttttagtagatatactgtatgtttctgatggactaccttgatttatttctgcatttaacatacacaactacatgtaaatagctattctatctccaaatagatgttaaataaagataattattattatagtaaatattgattttttcccatttcatttgaaatgcatgtcatgccttcttgttttttttaccttctataaatggtggtggtggtagtagtagtagtaactcaactacattgtatatgttgtataagttattagaggaaatttgacagaaaaaattatttctgctttttttttttcctttttttatttcgattttggaaaatttaactttttaattcaagatcagttaaataagtaaataaacacactgaaaagaatatatgcagagtatggaagtgtgtgatttctaaagactgcttaatttaaagatagaggatgttgtgatcaataacatatcagactcagcatcctaatattattaacaatttcctattgtcatcattccgcctattttatcctctttttttttcttttgcagtaacttttatattattattccagtttgttttctacaatggaccctaatatatcactatcaatcaaagatatcattcggaaagaactcagtaaagaaaattcaaatggatcaaatagtgttaaattggttaatttaaaaatttcaactttatctgaatctactctatctttattgtccaatgtggaaagattatcgttacgaaaaaatcagttgtccagtttgcctgaaggatttattaatttaaaaaagctaagatatttggatttaaagggtaacgagttcagagagataccttctgtattatatgaaatgcctaatttggagatattagatatgtcacaaaataaaataaagttattgcaacaacaggatgtgaatttatttaaatattggaacaaaaatcttaaaatattatcattaaaaaataatagaattcaatctgttagtaatctattatatttgaccaaattagaaaacttatctgtattggatgtagatgggaattatattccaaaagaggaattggatatggtattgtcaatgtcccaacaaaatagtaatagtaataatatttatttgccaccagaagaaatctggatgtctgctctaaggaaatatgcaagttctatcatgggcgcaaattctaataacacacagtctttttcaaataagaataacaacaacactaatagtaataaaactaaaataatatcgaaaagaatgggttttatcaatgtggatacgtcaacattaaaccctactgataaattgaaagataccgaaacagacccaactaataatattatgataccttcatctatgaatggaggtattgatctttataatcattctaaatataatgattattttaaaagactatctattcttcctgaagaatgttctgttaatgagacacataaagcatcacatgcagaaatagtagtatgttgtagaaaactgttattcagttttaccgaatgccaacagtctatcagaaagattgcatcattttgtaaagataaagctattgcagtcaatgtggtttctttattatattcagtcagatcacatattgaccatctattagaattattagaggaagcagaaaacgaaactaattttaacgatcaagagatgattaaactatgtatcacaattttgaccaattttaagcaattagtgggtaatttaaggaaaaattttaatatattttttttgggagatgatttatgttttattaggatgttttatatgacactgttatgttcttataatgagatatataatgcatggtgtttcattagtaatactgctgatttggaggcacatcaaagattacagcagcagcaacaaataggtataaaatctgtatcaactttaccaagaaaacagactctaaagaaaaatgattcatcggcaagtttatttgcatcatctcacaatagtggtattacatctttatcatcaaaaacagatattagtggaacctcttcgggtcataccatcgaaaatattatccaaaagcccaggatgagaagtaacacattacaaagtaaagctcttcatagccatccgatagatacaactcgatccttttctaatttaaccaatttgagtggcagtatcaataatactaacagtgataacagtgataacaataatagcaataataataatacaccgatgtcaacaagtactcatgatcatgcaagtcatccttctggtaatattactacatatggtcagtcatcattaagtggttcaagtacaatctcagggaatttatctgcttctttaattaatgttaatgaaaatagttttactactagtgtacgtaatactgtagctgatcacaaaaacaaagttataaggtcaccaatgatactgacgtcgcaggctacatcaggtcaattgtattctcggtctgaagatgttaacacacttacaagtggttctattgaaatgtcgaggtcacactcagctgctagtaatacaaatatcaatagtaatagtagtggtactagtgttgttacgagcgagaatgataataaatccagtctaatgaataagggtgtcgaaactaatatgttagacaaaatagatcaaaaagttgatgaggcatccgaagcacaaaaaaatgttgatactcaattatatcaaattttgacaaacgtcatcaaaatggtaagtgtagtttataatcaactaactggtgaaatctctaagattgctgtcgctagtacaagtggtcagaaaatactcacagagtcgttgtcatcaaagatcaaagatttgactgatacttgttggcaagctatggaattatcaaagtctctgaatgatcgattaaaattattattatctccggatcctaatattaccgagaaatatttgagtactgcagaaaaattgaaaacatgggaaaagattaatgcatttttaaaatcaattatttctatacttggtaatacaaaggaaattatgagtgatttaccttcgctaaatgaaattaggccgaatttagcctctctggcaaagattactaaagacgtcacagtgattttagacttatcttcatataaaagtgttactgtaactgctgctcaaatgcaaaagcaacagcaattacagcaacagcaacaacaacaatatcaacatactgcacaacaacaaaggcagttaccatatcagtatcaacaacaaataactagtaatatacatgtgccactgtcgactcctcaaccaaatatgcagaatccatttgacaatattgataccacgaaggagtaagtgtaaaaatatgataatcgttatataatatatataattctatcatgtgtaacgagtttaatggacaatgacatataacaatagataaaaaatcattgattaacttaggtattttattttagtataatattatatactagataattgtttgaaccctattgtatgatatgcttccacaataaattttcttatgagtttgtattaaaatacaaatatatatatatatatatatattatatgtttacatatacaattttatgatggagataacacaatatgcaaaatggagagaatacaacaggtaacaatagaataccataactatggatacaaataaaaataagaaaaaaataagataaatggaatggttttaaaaaaacgcagggatggagaggaggaaggaagaaaatgatgaatcatgtttaacaaaggtctaaacttgtttcatatattttactcaattcataatggaagccatggatatttaaatgttcgaaaaatagtggtaatctaactcttgacctttccgcgataccaacaaatcttactatatctgttctattcaattttatggaattattattacttcctgttattagtttggcaaaaattttatctaagataaagaaaagtttaaaaagttttgatatggtatcattatcctccacttcaatctcaaatttttctatataatctataacatcatcagcaatcttaatcacatatgaactttgaccaaaatcaaagattgatttatttttcaaaggtttgttgttaggatcattcattaaatctaaatttatagcatcatcacttactaacgaattagaatcattagtagcatctcccatttcctgcaacaaaaaatctgtacttgatgtattatcaattgaataccatataaaatctaacaaggattttatatcctttaatagttcagataattttttgtaaccattttcattatttaatcctctagattgtacaaattttctctgaatatccatgaatctttgatctacataagagacaaatttagattgttgtgtcattgataaacgcctaccacgttgtgtggttacagatgatgatttattctgtaatagagtggatgatgagaatggtgaggtgacatttatagaaggtttaaaatcctcaacgttatcaaacataggtgaggaagttgtattcaaggaatattcgttttcaccagcaatagtaacgtcttctgcgtcattaatagatcttttcattcttaagcatgcaggcataggctcattcatgttatctagattgattcttgagggtacggtacttggaggcagactttcgtcaaaggtaggattcaaatctaaatcctcaatttccttttcatctaattcgttaacattgtctagatttaattgttcatttgcctttgcatgtaatggagtctttggatcttctgatatatcttccattgtaaaagtgtattaaattggtattttttttttgttctttgatttacacacttggtcagtgaattatatgtagtagttgttatatattgttttttgataaaatatatgttaaaataaagaaaagaaaaaggtctcttgattaaaattaaacgatcaataggtcaaaaaataaataatggaataatttatcttgatgatctagtgtatttgtttttttatatgttaaatatatatatacagatggttcatcgaaaaatcgcattgatccctatttttctttacattctcctcattttctcaccgcattttttttctgttttttttcccaattattttctaaaaaaatatcattttcttgttagggttttatacaattgtctacacattttttctttttttaaatagggtataattttttttctgtttttttttgtttttccccttctggtataataaaattgtgtatactacttaattttaccatatatatggtattaccatgtgtgtataataagatgcttgtaacatattgtactatatgtcggatcccaagaccactgaagtaatttagattctaactagagtcagttacatatatcttaaatggttgtttcggttaataatggtttatgaaagtcttttgtagatattggggggaataaaatacatcttgatattcttgttatgtatctaatatatatgtgttcagtggatgatcattaagtatagaccacagggttcagtgaatatggtagtattataaacattaataggaaggttttaaataaagatttaaaatataagcatttttttctcattttatatgtgagtataaaatatatacaattaatgaaatgtaaatcatgtgcttagtttttttttatgaagtttagccgcccaagttggatttcaaatatatataaaggggaaggagagtgaagatataatcaaatattgttttcttagcgcctagtttgatttattttttgttatacatttttaacaaaatagagagacagaaaagaacgtacacgtttatacaagggataagtcggtactaagagaggatatggaacgcacattaggatatttagaaattatagataatggtgtagatactgcatcagggtttgaggttactagtgaagatttaaaatgtgaaatagatggatatctggcattgagaaaacactctatgatcaaaataggtcgtcatagaaaggaatgtcaattggttcttttggatccatctatttctagtgtccatgcaattgtttgggtgacactttttgatgaggaggctacaccaatgttttatattaaagatgtatctttaaatggaattcaaattaatggtttttctttaaaaaaaggcaatacatatcttcttcaagataatgatattattaatatatggagtgataacaacaataataacaacaaaagttcaaagattttatcagaacaagattattgtagaccattatttaaatttatttctcgtaggtcacaaagcttaagctctagtggattggatatttatgaaaaattaaatatatcaaaaagaattggtgattgggaaattggaacgaaagtaattgggaatgggacctttgggcacgttttagtgtgttatagagatcggaactgcaacaatatagctttaagtacaacttctattcaacggaaaacacgtagatttaaaaagacagaatatgcagtaaaaatcattaaagtcaaactaaataaaatagataaagaagctaaaattttattaaccttaaaacatccaaatattatcaaagttcatagaacttttgatgatcttaatggaaacctatatattttccaagatttaataccaggaggagatctattttcatatttggctaaagggtcgtgcttatcctcgattcctgaatcagaagctttattgatcgttttccagattttgcaagctctaagatatttgcatagtaaaggaattgtacacagagatctgaagttagataatatattattgtgctctccagaaccgtgtacaaggattattttggctgattttggcatagcaaaacatttgacctcagacttgaaaagaatgcatacaattgttggaacaccagaatattgtgcacctgaagttggttttaaagctgatagacaaatttatcaaaacttttcacgtgttgccactatcgataatgatcatgctggttacgatgaaaagtgtgatctgtggtccttaggtgtaattactcatataatggtaagtggtatatctccattttatggggatggtacagaaaagtgcattattaagaatacaaagaatggtcgattgaattttacaacatcacattggcgaaaagtatcagctactgccaaagattttgtaagggcattattgactgtagatgtagaaaaaagattggatagtgttgcagcgctggatcattcttgggtttcaaagcatatagatcaattaaaccaaatatatgagaaaagattattgaagacggagacaaaccaagaaatagaggaggtttccaaacataacaaagaatctttgaatatacttgacaatgatcattggaagaaaaaacttcctaaaggttcttctaaccacatcgtaaaaaaagtctttaaaccaaaattttctactaagaaattaaataataataaaatacagctgtttagatagaaagagatgggcagttaataattcaacctaaattggcattgttatattggattatcattgttatatgaagtataatatatgctttaagtacaagtttccttaatgattttttgatatcaatataatgagattgttaagtcttgctggataagcttgaagtaaataaaaaaataaggcataaaaaggaatattcattaacgatggtttagtattaatagatataatagttgataaactggtttaaggcaaatattttaaaaagaaggttaaaataatatatatatattcacagtcgtaggtgtaattatttcaaatattttgtgatatatttattgaaattgaagcttccattaaattaaaatttttatttttgatattgaatgtagtggttttacatgttatatatgaaataagtatacttgttaatctttgcagatcttgttgaagcattgggtttgacaagatatattctcgctatttgaaaatcatatcattgatcatctcttaatggaaatgtgggcgtaaaatgtttgatatgaaccacacatatgataaaagaacaccttttgttggatatgtttcagtgctataaaagcagtttatcaaattacatttaaaaaaataaaaacatattatttatttgtgtagttagttatgtgatattatgttattggattttttcaattgaacagaataatataccaaagtgctggaaaaacctggttattgcttagaagatttttattttaaaaaaagtttataaaatcatgtggtctactaattgatccagtagttattttttcttttaaaaattaactgtgtttaagatatgatgtagaatttttggagttttggatcgttttataatgcgggatgaggtacagttagtctaaacaatgttaattcaatctttgaattcatacataaattctattattatgaaattaaaaatttactgaaatcatttaatgatcatcttattattaaacaaaagtccctattttaaattgaagtagtgatgcgtttttagattgtctatctgagattgtcataaaactgtaattactaattaaggtatattacatgagatatcatgattcattaacagtcatttcagtaaagaaagattttagtatgaagaaattaagaaagaaaacttcatttaggataaagaagaaatttgcagataataaattagacataataattattattaaattgattctttcttacagtaactaaattaaaaatcgtcgaaattaccaagtagcgatggataatatgatttcaaatcaaaagataaacctagatatgattgaattgatttatacaatcacgtcagaataactcgggattttttagattatccgatttgtcatagaatctcataaacatattttacaataattagccattaattatgaagttttttaaagatacactccttttctgtatatcaaagaaatttcctaatctaattggcaatgaattaactcaaattaacaaatgtatatttgaatttagtatgaataggataatgtatattttcaaggaattttgtagaaatattgctattaatgacgtcgaataagatatgtaaatattggaaaaccgacaaaaatcactgcagatatataacttagcagaaggtaacatagaaattagtagtagattgtttgaaaagattggccaaaaggcgattaaagttaataaagctggatcgtaacaacaaattctccatggaaacatataatgcgtgcgtatataactagaatagaatcaaaaacatgattatttaaaaaatactatttataaatatagcttatgaatatctaaaaatgctgtattcttataatttttgataaaaacattgatatattttatatgttcaaatgcattgaattccaataatatactaacaagacactcaatactgtttctttgtaacgtggttagttctgtttttaatatattgttattgttgttcttgttaattgtttttaccaaaaattcaattaaggtattgatgtatgtataattgttatgaatgacattggaattattccaagcgatagctagagccggtagaatttgtagtatcgcaccaagcagtggtttgtgttttaataatgcaatgttaaataatttggcatagacaccttgccaattaaatccctcatatccgcaagcaattcttgagcaccaaattctttccaagaattttagaccgtatatcgtatacttgattaaagatttgtcttttttaatatcttgcgcagaaggaatacttataataatgtcattaagtgtttttttttgagtatctggcgttaattgttcgtaccattttataaaatcgttgatcccatccatcaaatcttcttccgtagaacgtaatgcgccagcataggtagaataatgtctccagaatgttcgtgatattgaattattgttgagccctaattgtaagttgaatattcttatatttggagaatttgattttgtatattgagaaaatagttttaatgataaataatttttcacaatgtttgtaagaatgtcaatgcattggtcctttacattcttggatggttctgctgcaagatacaatatggttggaagcaatcttgttttgatatcattctcacagaattgaggataccatttagatacaaattgacaagcactttctcttgtaaatctgccaacatcaccttgttctgtgatagtgtggtcatttaaaaattcaatgattatatccatataagtcttatcctcaagaaattttttaaaggcactcttattttgtgtcaaagttgaaagtaataaagattttgagttacatgataatacttctttgtgcacatgtaaatattttaagaacttattttttggcaaaaacgggaaagatgaacatattaaaggtttattatactttaaaaacttaacatatttgtaccaaaaatcatcaagagtatccttatttgagaagtaataggtgtcgtcatttgtacttaggatttctacagtattgttggttaccaatttaaatgaatcaaaccagggactatcttctgtaatatcttccatcactctataaaataatgataccttttccggtgtgaaaaattttggagtattgttaaggagtttgtaatgataatattttagaaacgataataacttgaaaatatcgtttttatgagaagaaaaaaaacaggtttttgttaattcaaagtctatcattaatgaatctgggttaatgaaatcgattctgttatccaatatatttaattcaataataaagtataacaatttattatatgttaattcgtttgtgacggtattatgttttgtatatttttgaatcatttctattagcggatattcacaaaattgtttatgaaattgacatagactgtgtattgaaagtgttacaatatctaaatcgaaattttctactatattatgttcaaagatccatttaactatatggttgaaaatattttgactatgtggagattcatcctttttaaatatttcatatagcaattttaaattatttgtgtatgagtcatgcagactatgaataggcagttgaattaaattcattattgttgcactgtttaaaactaatctaccgtgtttacccaataattcttgcaacgttgcattggatgattttctaattaaaaaatctctatcaaataaagtagtgggtaaaagaaactttaataaatcacagataactgaatttggtagacttgaatatctggaacatgaccaaataatgaaattggctgcatctttaacttgtgatcctttaatgacattcccaatatgcatttgttggaatctatatgcaaacggtaaaatttcaccggtaataattaatagcatatgaggtagaaattttataatgatcttagagcattctgcaattatgagtagatatgaatgcaacatatttatatctattacatccattgggatcgatgttattagagttaatatggaatggattatttcctcaatacatcggattgcctctgtatccccatcgaaatcattaatcattcttcttaaaagtttactatatgaatgagctagcataaaccttacctcagtgtaattagtatctaaatgtttgaaataccaatccatgatatcagttacaatagaccaattctctttccaacattgtaaaagaaatagtttcggtaagattttcaaaattaataactgtgaattttccagatccttaacgttcacgtttagacacaattgagtaattttgtttagattatcatttgaatcatggattaaaaaattactggtagactcgattaattgagtctttagatagtaatttaaagtttcgagatcattattacgcagtagttcattgtctatcttttcacaaaaaagagcgtaatttttttggtataaaatggcatgaatctgtgtcacaatgtggtttaacacttgatttgatttaaaattataagtcagctgccaaatgtatttatcagtagaaatattaaagggagatagaatgacgattcgacaccaggagagtaaaaaaaactgtgtttcccatgggatatcggtttttaacaaagttattattgaatttaaataagttatatcagttgatagatatttattgacaattttattagagcaaattttagtcaaattgtaaaaaaatttcgattgaatgaaatgtattttagataattgaatattaggatcatctatggccaaaataaagcttttattaatgtttgatatgaattcatttaaatagggtttcagtatacttgggtcattttggaaatggttgattgctattattgttttatgtagaagaccgtcatttggatttttgacaccctttctaataagttgcaaattatattcgatattgttgttatccattcaaatattgaacggtttcagttagagaggagaaatagtttgcaaaaataaataaataaataaggaaatatgtatgtgtgtgtgtgtttatttgtatatatatatctatcagaataaataaaattactttaatctgatggtgatgatcagggaacttcttttgaacattctcgtgacctgtgtgtatttgcaagtatatcttaatggcaggatgagggatagaaaagtaagtctagcaacaggaaatttgaagagaaaaaataagaacataacctaattattttgcaagaatgaaaaaagttttgagaagtggagattgtaaaaccctaaaggtttttttgtaagaaaatcgaaatttgcaaaaaaaaagaaaagaaaaaaataaattatattgataaaaaaaaaattatatcgggtacacgatacggagttttattttggatgcacctctggcatctgtaaaatgtaccaagctgttgattgaaacccttctgccctgccttaagaacaaagtcttgtgaattaacaacttgagtacatcaggtcgaaaaaaaaattagtttagatttttccaactgttatcaattatttgatgtcaaaggtcttgtggaatatatcatggaatcatcaatttacacaggtctcatatatatatatatagaaaaagataggttgtattcaagcaaaatactagtaatgataatgacatgttccttatatatatatatataagtccataaaaacatcattcaaagtacttagtgataattagaaaattttatttcatatcttctatcttgaagtatgacggtattgagcatttagcaaccaagtgaaaagaggaaaattgggctaaatagtaaatgattgtaaacgttaacatccattaactagttttaacaaagtagggtttggataaaattctcaaaactttgtattagggacacttattgctttttttttttcttgtcattttttgtctgtccacaagactgtttgtctgataaaccaaagttaaaatcaacagaggagaacaaaccacaccgaatgacgtttttttgtctcgaactttactgaaaaggaacgttgattcattctttttttccccttcctcttccccgagagactgcaaaaacaaaaaaacaaaaaacaaaataaatcaacgtttcttttaggggggattaataaaacaaagcatcacaaaaaaaaataaaaaaacaattgagtagaacaatatgctaaacaatagaacatgtggaataaaataaagcgccacttggattttctcctggtttttttgttttgctaagaagatgattctttcgagtggctgctgtaattcccatttaggaaatatctggaggtttatcgaaacggtattgttgtctgtattacaaataaattagaccaaatattctattgttcagtaattttgtcgagactgtttcttttgttaattggtggattcaagattaaaatagagaaaaacataaactttactagttttattaaaagtgctggactagtaattgactttgactttaactttcagcttaattgagtttcactattattcaatttcaagaaatgaggtccacggtatatcagaaaaatccaaggtaacttttgtgtctgtgtttatcatatgttatttactgtttgaatgtgataccattggttcttttttcctttatatagtataaagacaaaaaaaaacatttacaacctttgttactaacgtttttctttgtatcttccattttgttcttatcttctttgttttttttctttattcttccttgtttgtttacttgtttattgatttattttattaagatcatgttcacaatactaatggagttataaattgttttataccccttttttagtaggtggagataatgatatcattaattacctttaattctttggtatgccttaattaacttgatcagcaaacatatgtatgtttttatatgtctatgtatacatatatatacatatatatatgtctgtgtgtgtgtatgtgtgtttgtgaaacccctttgtaaagattacaaccagtaatgttatatgataattgttgtaataactattcaatttacagtaatttaatttcccttaccttgcttgattcccataaaagtgactcttttacttttttgtttttttaactattgttggttcatgcttatagttttgtttttttcctttgactaggtggtaaggacttaaaaacaacaacgttactagtagccaaggtgtcaaatagcactttcaataaacactttttattttctttttttgaaaagtatcatataaacgattcgaacaaacaatatacatataactaataatattaataataatattctttaacaagatattatgacactggaaagttttgacagttttacaagtagtaatatgactacaaaacgtaataatcctctcaatgttgaaaaatctaatggaacagtagagggtttagaggaaaaaattttctttaaagatgataaacatataaacttcatcgacattgaagcacatcgttccactcaatctataccgtttgatgcagatgaaattgagttagtagaaagagagggcaaattacagcagggcttgaaatctcgtcatatccaattgattgccttaggtgggggtattggtacaggtctcttcgttgggacaagttctacattggctacgtgtggtcctgcaggtttggtcatctcttatatcattatttccacagtcatctacccagttatgaacgcttttggtgaaatggtttgttatctaccaggtaatggtaatgactctgcaggttctgcagcttatttggtcggtaagtatgttgattcgtctctaggtttcgctacagcatggaattactattattgtttgattattcttaccgctgcggaatgtattgcagcctcgggtgttatagaatattggaccactgctgttcccaaaggtgtttggattttgatttttttgttagttatcattttattgaattgcagccctgttaagtattatggggaatcagaattctggtttgcttcaatcaaagtgttatgtatcattgggttgataattttgtcctttattctcttctggggtggcggtccaaaccacgatcgtgtgggattccgttattggatacatcctggtccgtttgtctaccatattacaacaggctccttcggacgattcttagatgtttatactggtattattaaaggtggttttgcattcatcctaggccctgaattagtcgctgtgacttcttctgaatgtgaagatcaaagagcaaatattgctaaagcatcaagaagatttgtttggagattaatgtgtttttacgttcttggtgcattatccatctctgttattgtggcatctaatgaccccgtgttagaaaatgcattagtacaggggaaaccaggtgctggatcttcccctttcgtcattggtattcaaaattttggtatccaagtgttgccacatattatcaatttttgtattttaactagtgcgtggtcagcaggtaatgcattcatgtttgcaagtaccagatccttattgacaatggcaaagaatggacaagctccccagattttgggccatatcaatagatttggtgtcccatatatggctttagctttatctagtgccattggatgcctggcatttttaaattcgactgcttccactgcagacgtattcaactggttctcaaacattagtaccattgcaggtttcattggttggctatgttcgtgtattgcatatataagatttagaaaggcaattgaatacaatggtctattagaaagactgccatatagaggtgctttaatgccatattcggtgtattattccctttttgtggtggccttggtcattttgactaatggttatgcaactttcatcccaaaatattggagagtggcagatttcatcgcagcttatattaatttacctatttttatcacactttggtttggtcataagatatggacacgtacttttttcaagagatggtggaaacctgtagaagtcattgatgtcactactggattagaggagatagaagaaaaaactagagaattggatgaggcgagagtttatccaacaaccatctggggtaagattgttgacgccatattgtgaaaaaacagaagacaataaagggacatctttggtgcatctttgttgtttgtttgtttgttttgttcatttttatgattcttggcatttgttaatattcttttttttttgaatgattgaggatgttacttaatttcattctttatattctttcttaggatgatcaaaagtgtttctcctgtttattttttgtaatttatatgtctttgcacctgataggagcacatgtatagtgacaatattcattgtttgtattgtattttagtaaatgtattctaatttgactactaaagccttttatgatattctactttaagatgttcttttttttaatatattatatatccaaggtatacaatgtctatatataagactactatctgatacaatcgatatgtctgtaacacgtataacagtttattctcattcgtgagacttgatttttcgatttttctgtctaggtttctgtttccaatagttaccgatagtcatcggaaagcattggatttcctccttttctcttttctctcgagacagtgaaaaattaaggatgatttacgttttatgacgaattatacgatagaaattttcattaatagtggagtctgttgattgaaacagaaaattcattgtacaaacgaaaaagtctcatctttcttcctctttgcaagtttcttcatatgttgtcaatctagtcattctttaggcggtttgactggtctgctaaatactttttcttactgaattgatgaattctatattgatacatcgatttcgtactgtggttagacaacctaagtcaaacagatagtgtaatccaaaaattttgaaatataaaaacctttattacatgaaatcaagattacaaagattgataaatttgaagtacacccctaagtcaaatgatcttagaaagacatctattattggtacaattggtccagctacgaattctgtagaaactattacagaattgaggaaggctggtttgaacatcattagaatgaatttctcgcatggttcatatgaatatcatgaatctgtgataaaaaatgctagagcttctgagaaaatctaccctggtagggccttagggattgctcttgacactaaaggtccagaaattagaactggtatcacagttaataaaattgattatccaattaatgcaaatcatgaaatggttttcactacagaagataagtttaaagaaaagtgtaatgataatatcatgtatgtagattacaaaaatattacaaaagtcatcgagcccggtaaagaagtttttgttgacgatgggactctttgttttgaagtattggaaattattgatgattccaatttaagggtcagatcgttgaattcaggtaaaatctcctctcacaagggtgtcaacttacctagtacaaatatagatttacctgccttgtcagaaaaggataaaaaggacttggagtttgggattaagcataatgttcatatgatatttgcttcttttatcagaactgccaaagatgtggagatgattagaaaaactttaggcgaaagaggtaaagatattttgattatctctaaaattgaaaatcaacaaggtgtggataactttgatgaaattttgaaagttacagatggtgtgatggtggcaagaggtgatcttggaattgaaataccagcaccagaagttttagctgtccaaaagaaactaattgcaaaatgtaatttggctggaaaaccagttatctgtgctactcaaatgttagaatcaatgacttacaatccaagaccaactagggcagaggtttcagatgttggaaatgctatccttgatggagtcgattgtgttatgttatcaggtgaaactgcaaagggtatatatccagttgaggctgttaggaccatggctgctacagcattgattgcagaagaggcttttccctatatctcacattttgaagatgtaagggatttaacacccaaacctacatgtacagtggaaactattgcagtatctgctgtctctgctgttattgaacaaaatgcaaaagcaattattgttttatccgctaccggacgtacaggtagacttgtgtctaagtactcgcccttttgcccaattatcatggttaccagaaatcaaaatactgcaagaaatgggcatctttatagaggtgtatttccattctattatgatcaacctcgtgttgatgaatggattcttgatgtccataaaagattacagtttggtatcgaaaaagctaaagaatttaatattctcaaggagggtgatgctgtgattactgttcaaggttttgcaccaggtattggtcgttctaatacgttacaagttttaaatgtttgaacaaaaatgaatgataaacccctttttttatttgcattcttatttattatttcttctttgtttttttccattgattttttggatatagtatgtatatatatgtttaattaagtgaaaacaacattttgtgctttttgttaatatttctaacgaattacttctacgtgtaagaaaaggggtgatatttttttggcaatttctattagatattagtagggtttatagcttggtttagatttaattatagattctaaacctaggtagcattgacacttaaaaaaatatttgtgtctaatataaatttgaaggaatgatgaagtacataacttttgagaagagatattttgatactaattgaaattcaaaaatgaatgaaaacaggaattgttataaaatgatctgtagttaataggatatatctttctattttattttttctgatgaagagtggtgaaaactctgttaaaatatttgaaagtttattgttgagggcagatatttcgtaaattgtggtttctttttagagtatattatatgttttgaaaaaaaacgatattggtctttatcatcagtaggaaaaaggtatgtgttgatgcaagacctccatagcaaaaatttattaaaatttattataaagatgatatgataaaatgatacgaacttatagtaggatattggtgagattataggtttttaacttagctaagagagaaggatttcgtgttatattgcatggttttttctagtctatgtaactcagttggtaattgatttctctttgatataaacttttataaactttttagttatttaccattacaattttggactattaaaaataattctaattaaattttaacaaaatatataaacattgttattttagaattcattttttgtatagtatgtaagggattatcccatgtagcatattaaaatatagatattaagtttatataattacttataaattataaagctgttgattctaaccaaaaaatcaattatataattgtttttattcctattatgttgatacatgttgaataaaattcaatagatataaaaggaatattaatttgacaaaccttcaaatacacttgctgtttgggttcaaagctgttctgattcttttattttgagacttgtagataaaccaattaatattgttagttgtaattctattgagattgataaaagaaaaatttaatgtgaaatatgtggaaataactcaattggcaaaaagctgaaattgcatacaagaataagatagggagtgcaaagaaacaaatttcataatctttctgtaaacattttaagtaattttattatatatagaaaacattggaaaattctatttataataaatatatcagtaactttaattaaaaatgattaccagttttattagctttctaaatatttttttttttttttgaaaattattagataggaaatatgtatctcaggatttccaatcaaggtttctttgcttattctttttgtgtaaggaacctaactggaaatccagtagatatgcaattccgagggtaacatctgagtgtctgggtggagaattggtacggccatgtgctcagtggctcgtataaggtattgaatttgattggaggatttccagggagtgagaattatatcagatcttgtcaagaggcctttgattattgagagatatgccagggataatcatcttatttaaatacatcttagtactgatattaggaggcgactcttaatatcatacaagaagaaaaacaacaagaagtaataatacaacatcaggtttattatttagtaatatatagagtttacgtaagagtgtttatactcatactaattgatacgatccatccagttacatacaacaactcttacattttgttggtaaaaaattacattttgtgataaattgacaaacttcgtgatcaacaaaaaaaaaatatgagattttcaaaataaacaaattcagttacatcatacttatggctttttaaaacatgttgaaatataattattagagctatgtttgataatctaaattcatcgtactaagtgattaaaagttatgaaaatttatagtaaagaagattcaaagataaaatgagtatactgtataatattgtatcttgtatattacttatatagaaagaaaaggactaagcaataaaataacaatttatagtaccactaacttcctactataaataataatagaacttataataccaccaatatcctattgtaagttacattatcttattatattagtttaaaatgaactcgactagaatttttgattctgaagccttgcgtcaacaaaacaaaatcctctaaatgttgtaaaaatatagaaattcaaatataatacatctttattcttattaaaaatataaaaagaatatatatataattatgtataatttaaaaatagaatagtccatagtataaagttattttaaacatcatattcaatattgatgttccgttcagattgaaaagtcaaatgattttgatgtaaaattggaataactacattaaataaaatattatcccattgttgcaaacaagattgggtaattgtagtatcattaataattcttgttgaacataaattcaattcggtagagataatatttgcaactctcaataccaaatgaactctatttgtattatagagcttaatcaagtatctcttaaacagtttaacatccttttcatgtggacctgtagaatctgtgattgtctcccttatccattgaacaatcatgttacaaatactttgaaaagaatccatattttgaaatttaataggttcaaaaatagaaactcccccaataaaatggcttgtcttctttgatttttcaacctctctcttagcaatatttcgttttaaagtttcggcctcgcttttcttagcttttgaataaattcttctttcctgattaatctcatttctaatctgagttggtaactcttttaaaaaatcgatttgaaaagtggaaggaatatcgtcaaaaacattgttgggaccaaaattagtcactttatatatacgtgaattttttaatggtgagatttgtcttctcttttgctttgatttatttgcatgaacaggacatagtctaataccaggtatatttggtggcattaaaaatggtggttgaacttctgcttctcctgctgttattattggagatggtgtttgtattcttttagaaatattttctttttgtaacacatcatcaattcctaacttattgggcacattatttccagaatttttgatcgctacttgaaaatggatccccacaccacgtaattccaaaggtggacacgccaatattctaaaaagattctgcaattcagtacaaataactccaggatcgtcactcggtactcctaagttcgagctttgagaaaatgagtcacatttaccacatcccaaatatttaggtggatcaatcggggcatatttacttcttcttaatatttttaaagtaatagatgaagtacaatacttgtatggggtcagttttgtttcaattaaatgaagagaggcccttttcaaaaactgatcgatctgttttattgtttgaaaacggatcccccaattaatttccaaagaaattgttttctttgcaaagacattttctgtatcatataccagtcttcttgtttcctcatcatctttaccttgcaatgccaagaatactttcatccccaatttgttaccaaatatgcgcttcaatgactccaatgtggggaacttttccgataattgtgataatgttttaatagtgggatctaaagagtgtaagatgtttagcattgaaggacccaacccgggtaaatcagatacttctaaattcgacaggaagatatcatcaaaatcaaaatcattcagaataatatgtatcccattgggcttagccaattttaatgccaaccgtgcttgcacttgggtgtgcccgactccaatactgactgtacagccttgcgttaattcaaatactttatctctgatgtcctgacacaatttgtgtaacgtatcagaataatacattggagatcggggcaacaaggcaatgcattcatcaattgaaatagggatcacttgatgattgaaacaagggaaatcgttgttcaacgtatcgaaaaggatccgtgaagttagtttaaaagcattgaaatcatagggcaaagtgatcagttttgtactactaggcaaaagtgaagatgcatgtgatacccacatgccattccggataccatattttctagccacataattacaactagcaatatctgagtttccatggccatgacaaacaacaattggatctttatcaagttgacaagaaagcaagtgtggtggtctatataaatatgccacagtggcaaaaaatgagtcgaaatcgatatataaataaatgaattcatcatttggagacacatggcgatgcctattattagacaaaaaatttgatctcaattgtgatttccagtcggaaagaaggtgtaatctagagtttgacaaataattacttatgaaactggggtcattacagtctgtattttgacctagcgaagcagcagtaagattgctattcgatattagaagttttctttgagtttcatctgaattagacaaaagcgaataatcttgccagggcaacaatttattattttcgattgaatcaacgatccaatctggcttcaccactttatacttttgaaattgtattcttttttgcaaaggcaagtttgaggcaacaatatgtgtgacaccagacagcttggtcaaataatgcttaaattgaccaccatgaaaaactatctcttcatgtaacttcaatctattccatggttttgtgtaaccattgacatatatgatacagttctgaaaaatatgtgatttaatacctttattcttttcatctctctgcaactgcttttgttctttatccgaaaaatagtttgatcgcgtataaaccatatgctttatgatcaaatagttacacccacccacatatgctgctatgaagtacttaattaaatattaccctatactatcaatacataattcagtttttccagtcacacatacaactgtaccaaatactttcaaatgtaaaaatctcaaaggaaatgagaattttacagttttttgaagcaacagcattaagtgatttcttcctcttgcctttcatttttacctctgtttaatctcggaacagcatcttaaactccgaaggaggaagacgaaggaaagctcttttaaagccgcgttagaaattctgtcaaaccaaaaaaagaaaaaaaaagaaaagaaaagaaaagttaattttggcaggttttgatttccgttctttttttttttcttttcttttcttgttgtcctcgtgtccttccgcggtaaataacaagaactgacgttgcacccatacattatgggagtccgtgtgggctccattccgtttgccctttacccaaagaggaatggagcccaacaacttgatggactttcctaaacgggaaaccaaagggccaaatttggccctccactatcgcaaaacaaaagaaaaaaactttctaaaaactgaaaaacaaaaaaaaaaaattgaagattgtcccacatccagacaccattgcctgaaagaaaaagtaaacaaaacagatttgctgaacaatatggacccaaagttctgatatctcgaggaaaaagaatgtgcgaagggacaaattttaaggcaaggatttagaaaatttatcaattttgttgtttttaattatttaatcgtcctttttaaaataaaagtgaaaaaaattagggtatacattctttcacactatccagtctggcaattttttcacaaaataagaaagggttttcaaaataatgtttcttgtattccttttcagacttccagtactaacacttttcttattaattacaataagataatcactactgaaataaaaccaagagagtaagagtatgacatacgagtggctagtgaacaagacgacaaaaaattaaaaagaaaatcttggtttttttggtgtcgtagaaaaacctttgatatttcaattttttatttttttttttgtttcttagaacattatttttgtagggttttacaaatagggtagtttctttttccttggttaaaaatacttaggtgtttaaaaagtcgaaaaaaaaaaagatttccgaaactagtataatgattcagtttattcctttttggaaaaaatttttcaaatctctgatactctgagactattattcaaatgaagacaaaagataaaagaaaaaaaaaaaaacaaaaaaagaggagaaacaaaaatagaacaaaagaaattacgaatactcgtgcctaaaatgtttctgaatccattgtgttttgttgattttaatatttttctttgtggctaccaaaaatttctgtttttggatttttcttccagaatgaacatctcgaaaggaatgatgtattatattaataactaaatagataaaaggacgagcggaaaaacacaatagtaatgtagtattatttttagtacaatgtttctacaaacaaaagaagaatagaggtatttttttttaatgatagttcgagttgtttatttacttgtttacttatttatttgtttatttattgatttttttgttggttgtactttctttttttttttttttttttgttttgtttttcgttttttggttggattgtgtttcaacagataacaaaaggccacgtttccatatcaacttcaggaaaaaaaacatttatgttgtatatatgtatatatgtatatatgtatatatatatataaatatatctatggatatttacacatatatatatgtacctgaactcaactatgtgttcgacattataactttatattaagattcgttactcatatgacatttactatccttgatctaaccaacacacacttacacttgagtttcttgcgttcttcttttgtcccttgtggtatacctaacttagtatcatcaattaatattcccattctttgtaaaactcccagttctaatataatacacaaacaccaagtgaatttgtttttcttaacaaaaaaaatataaaacagaataaaaaaggagcaaaaaaataactcacatcaattcaaatatgaacactcaatatgtttctaacttcgagatcccacaaaataccaacaaagacactgctactttcaatgactggatgtttcaacaatacgataacccatcaactgttgtgtcttcattcccaggcatgaacaaaaaaaatgtcttcgaaacagaagattctccttcttcatccacgtggtttgaaccactggaagccattctgtcttctgctacttcgtcatccacgggatctcctatatccaccgcttcgttatcggaagtgaagttagaaccaaaggacgattccttcgaattcaccttgaataagatattagaacaagaaaagttgaagcaagagacggaaacagagacggatacggagaccgacacgttgaaaacaagtgtgaaagaagctgtagtgataccgaaaagatctaaaaactccggcactggtaaaagacaattaacagaacaccaaaaacaagctcataacaaaattgaaaaaaaatatagaataaacatcaacacaaagatctccaagttgcagcaaatcataccttggttagcaaccgaagagaccacattttcctgtcagttggatgataatggcaaatgctcaaacaaggaatctgcttcaaacattaaaaaaccacgattaaataaaagtatgattttagagaaggctattgattatattctttatctacaaaacaatgaaagattatatgaaatggaagtaatgagattaaaatctgagttaagtcaatataaatcatgatattcctacttagtcctcctaccctctttactttcccttacctccaatttattcaaatacactctaataaatttttaatgatacacatcttaaactagcatttagaaacaaagcccctctaaacaccccttcccttctctaaaaaaaaaaccacacaaaaaaaataacagcaagacgactgaatattcataaaagaaaatgcaaagtaacaacaacgcaataatatttcattgtaatgacctcattttaatgacatgacgatcaaaagggagaaaaaaacgaagatcccttccccctttaacccactataatttactattaatcatatacatactatatacactctctacataacgtttataaactttgaagataaatttttcttaaatgcactttatttgatacatcttttaacatgttttctttgtcgctatatcaccatccataaataatgtaacttgtaaaagcatttttcaggtttagttactcactgggtctaccatttaacaactgtatcgtgtctacattattaatcatatcctctcgaccagcaaatgaacaattttgacactctgcaatatgtcaatcgtaaacaaactgggaaacaaacataaaaaaaaaagtaaatttttttgtgaaacgtccctccaatccagcaattacctcattaggaaacgtaatgacagactgaaaaatgaaaaaaagaaagaaaagaaagaaagataaccaaactgtttttttttttgctttcttttttttcattttttctttttttgtcgaagacttgaaaattttcttcttgaagatcgaaaacgctgagtcactataaaaactgcagtaagatctcatcgagcatggagttttcgaatcaggacagattatttaatatgttttgttttacttatcgcaagtctttattcagacacatatgtgcatatctatctacatatccttatattcatacatgcatttctgtttctttatgcgtctttatgtttttttagatcgtgccttgaataattctaactatagtattcagaaattcacctaatacagaaaagagacacactacatcacgacacattagtctcagtaatacactatttcattcttcttcccctctttaagaatatatttatttctttatttttgtttgacaaagacagaagatgattttggatgaggctgcatttaataaacaattcaactcacatcgtttacaacaattagataaaaatgtattcttcggctccttaccatcgctaaatgatcttgactcattgaaaaccaacaatattagatttctcatcggtattgatattccaacagagactatgtcacaattatacacccactcaaacctttgtaacttatattcctccaatggtatcaacgatattataatgattaatttccacacttctttaatgccacaaccatttaacgttaacgatccaacaatctcctgctatatcaataataattcctgcatgttgaataaattgactgcacaactaaaccccgaaatcttcaatacaaatcaggtgatctacggcaacaagacaaactatacaaatgtcagattcaacgtattccaattgaacaactatgacctgttcgaacaattcaacgattggttggagattttcaagtccacagggaacggcgtgcttatattcggtgatcacgaaaataatgaaacttttatagcattattaatatcttgtgtgatcaaaaaatcgtcaaacttgaagatcatggatgcattccaattcatcaagtctctaaagaatgattcgaatgacaacatccaagaacaaaggatttactggaacagtggattgttgagctattacgaaacaataagaaaaaactctatggtctggaatgctaacgggataccctctttatcatatggatcatcaatgttccagaataagaccatctcacctaacaagagaagagtaataaatcttcatccacaaaaccaaactccaatgtcgcccacttctccacttaaaggaaaagtaaatcctgtgggttcttttgatagatgtaaaagggctcgttccgactgatcaagaccaaaacaaaccaaactaaaccaaactaaaccaaaccaaactaaaacaaaaaacaaaacgaaacaaaaaaaaagaagtagacatatataactatcgatttcatcttctgatcaacctctggtaggttcagctctgcatctatttaattcacatatattataatactcctcctccatcccctttttctcactcaatatcaagcttttatttcaattatgcatgagaaggtgttgtactactacatcacaacatttccatatatatatatatgtacaactgtttattcaactatactgtgctataccaactaatgtagtctatgtaacgttaatgtattcgaagtatttgcgatgacgttcgtgttaagtgatccaactttcttttcttttttttttttaacggaaagggaccaaaaaaattttgaaaaatttagagagaattaaaataaaaattgcaaagagagaaaatttgtatagaacactaatagaagtatatcgaaatacgtacaccctcttagcctctactaattagtgaccaccattttactcctttaatacatatataattaaataaagtaccaaagaaaaagaaagtaccactaggaacaatacctatatgtactaaactatcctagaaaatggctaagaaagggaaaaagaatcaacaaaactattgggaccaagatttcgaagaggatttacctcaaggtgaagaattcggcgtttcttttacaccagtagatgactcctccaatactacaccagctagttctgtagaacctcaacaagctggtgatgaagatcttgctgctgaaggtgactttatgtccaccttaaaaaaatctaagaagaagcaagaaaaaaaagaagaagctaaacctttattaaagtccaaaaaggagaaggaaagagagaagaaggaagctgaaaagcaaagaaaaaaggaattagcggccaagaagaaggctcaacaaaaagcacaaaaggataaaaacaaagaattaagtaagcaaaatgctgaaaaattagctgctgaaaaaaaggaaaagtctgcagcttcgtccaaagcttcatctcaagaaccagctccagttaaaactaccacttccaacactaccacagctaaaaagggtaagaaggttcctgctggtttagctgcattgaaacgtcaattagaattgaagaaacaattagaagaacaagaaagattggaacgtgaagaagaagaaagactagaacgtgaagaagaagaaagaaaggctagagaggaagctgaaagagagaaaaatagacaattgaagagagaaaaggaaaaagctaaacgtgaaaagttaaaggctgaaggtaaattgttaaccaaaaaacaaaaggaggaaaagaaattgatagaaatgagacgtgctgcccttttagcatcagggaatatcaaagttgctggtcttactaagaaagctgatgctgccgctgatggtgaagttacaggggaaaagaaaccaaaaaagattgtctatggtaagaagaagaagagggtcactcaaaaagataatgatacaaaggcagttgccaagagtgaaaaagaagataatgagaaaaagaacaatgcaaatggtgaggaagttggcgaagatgtcttaattgacgattgggagaacttagatttaggtgaggatgaagaagaagagaaagaatttgctgtttcttctgctgaaactgaatctgttaatactgaaccagttaatgaatcaaaagctgaagccaatgctgacactcaaaaggactctcaagtggaagacacaaaaaagaaaattccagaagtttccactccagcagtcaacgaaagtaccaaaaatccaaagaaagatttacgttctccaatttgttgtatcttgggtcacgttgatactggtaaaaccaaattactggataagattagacaaaccaacgtacaaggtggtgaagctggtggtattacccaacagatcggtgccacatatttcccaattgaagctatcaaacaaaaaactgcctctatggccaaatttgaaaaacagacttttgacgttcctggtctattggttattgataccccaggtcacgaatctttttccaacttacgttctagaggttcatcattatgtaacattgccattttggttattgacattatgcatggtttagaacaacaaacccttgaatctattagattgttaagagacagaaaggccccttttgttgttgccttaaataagattgatagattatatgattggcaagctaccccaaacaattctttcagagattctttcgaacaacaaactagagctgtcaaagacgagttccacaccagattaagtaatattcaattggcattggctgaacaagggttgaattctgaattatacttcaagaacaaaaacatggctaaatatgtttctattgttccaacttctgccgtcactggtgagggtgttcctgatttgttatggttgctattagaattaactcaaaagagaatgtccaaacaattaatgtatctatctcacgttgaggccactatcttagaagttaaagttgtcgagggttttggtaccactattgatgttattttatctaatggttacttaagagaaggtgatagaattgtactttgtggtatgaatggtccaattgctacgaacatcagagcattattaactccacagcctttacgtgaattacgtctaaaatctgaatatgttcaccataaagaggtcaaagcagccctaggtgttaagattgctgccaatgatttagaaaaggctgtttctggttctagattattagttgttggtccggacgatgacgaggaagaattgatggatgatgttatggatgatttgaccggccttcttgattctgttgatacatctggtaaaggtgttgttgttcaagcatctactttaggttcgctagaagctttattggatttcttaaaggatatgaagattccagtgatgtccattggtttaggtccagtttataagcgtgatgttatgaaagctagtacaatgttagaaaaggctccagagtacgcagttatgttatgttttgacgttaaagtagacaaagaagctgaacaatacgctgaacaagaaggtattaaaatctttaatgctgatattatctatcacttatttgactcatttactgcatatcaacaacaattattggaacaacgtcgtaaagatttcctagattacgccattttcccatgtgttttacaaacattacaaattattaacaagcgtggtccaatgattattggtgttgatgttgttgagggttgcttacgtattggtactccaatttgtgctgtgagaacggatccaaccaccaaggaaaggaatatattattattaggtaaagtaatgtctttagaaattaatcaccaacctgtcactgaagtcaagaaaggtcaaactgctgctggtgtagctgttcgtttagaagacccatctggtcaacaaccaatttggggccgtcatgttgatgagtctgataccttatactccttgatttctagaagatctatcgacaccttaaaggatccagctttcagagatcaagtccaaagatctgactggctattaattaagaaattgaagccagtttttggtatcgaataagcgtaattagtttctaatttcattaaattatcactcttttataaacaaaacagataaaataaaaatcattctatgtaaaatactctattgaaatattggtgggtaagaattattgtattttctaagtttattaatcttacgattcctgcagtatgaaatgttcattgtttaagcgtgtatgagcattggtatataaataattaaatatatatatatatatatatattataatattatcgttattacgtctctctattatattcaaccctagtataattaaaataagagggggaggcaaaatcttccctaataaactcttttatactgctgaacactcaacctttagcaaagttaactaccaataagcaagattgaaaacttgttattgcttctctattttttttgaagtttttaaatcacgtgagccattaaaaaaatttttttttaaatagtgaagaaatattttgacatcacaaaattcgatgcccttgaagattagttgttatagatacatataattcattgaataaggcattcatgtcagattgagatcgtataaacaataagtttgcctaattaaaaagtatcggtgtagtttatttcctaatacaaaccaagaccaaagatataagaagattatcaatccataatggttgctactaaaagaacagctgaaagtttgagagctgcaagatttatcaagaaacataaaaaacttataactaatccaaaagaagatggtgtctccaattgtattattcgtgttcctgtaacaatgtatgtctcattagctccaatgtatttacaaaatccattacaagggataatgaaacaacacctaaacccaatgattatgaaatataataataatattggcggggttgttatgggctatgaagatttaaccattatggatgccgatccaaatgatggtggggaaaagataggcaaattaattaaggtcacacctgacactcctttcagttttatgtggtgcaaagttaaattatatgtctggcaacctcaggttggtgatgtgttagaaggtaatattttcattcaatctgcatctcatattggtttgttaatccatgactcctttaacgcctctatcaaaaagaacaacattccatacgattggactttcatacaggatgaacaacaagaagatgtcaatgaagatagtcgagatgataatgatagttctaagccaaagaatagaaagactggttcattgggtcattgggctgattcctatggtaatcaaatagatgggaaattaaagtttagtgtcagaaatatatatactacaggtagagttgtatcagtcgaaggtaccctattagaaagcgaagaaagtaattctgaggcagaaaaattaccagtagtgtcaaataaaaagatagtgtttgatgaagaagtagaggaagaaaacagagaaagtcacaaagatttagttttatctgaagttaaagaagataatggatcatctattgtttatgaagctaattctagcagcagtgattctgacgattctgatgaaagcgattaatttccacaaagtgaaaatgtgaacaaaagaatctatacaaactacttttataattgtatattacaaacagcacatattaatatttatatataaatacagagtataattttctcattatattattattaagttgatattgggttgataatattaagatggattcaagataatactgattaaagatccgaataggtggagtattcataattatctctttttacaaaattgatgtatcctaaaaatacattagtgcaatgatgatggttattacgaaaagagagatagtgaaaataataactagaagctttttatggaccaaatatataaaatatatcagcaacatataataagaatatttcacagtaaattttgagtattagggttatgggtaaagtcaataaagaaaggttagggttttctggaaattttttttgctagtgccatgaaatatgtataagtaacgaaagattaacgcatacaaaaagaaagaaggcctttttcacttcaataccctctgacttgaggaatgaaaacctttagggatcaagaaagtcaagaaagatagaaactgaattatgctattgaaaatcaaaagaccgttattgattttgattaatatcctggcttttcaagttttttttgtggattccattaagttaactactgtagagagattcacaagcaatcattcagaccctgtgactatatggagcattcttaatcatatagttttagacaataaagaaggccgaaaattactaaatgacctatatcctataataacagggttagatgaatttagcgaaagtgctgaggattattatattacagaaaactttgaagaaaaagaagatattaaagcagattctactttattccaaaaagtaatagacactctgaaaacttttgataaaactaataaaaattctaaatttgaaacaacttttagtgctcaattatttaaaacttactacgatctatatccctttggcttccttgattatgttgatccagatctttataaagtaaatcattttacattaaatggaaaaatattcgataaaccggatgatagcttctatttgaggtctgatgatctaaagaaacaatcaaaactaacagatctcgaattactatcagaaaatgataacccatctgctatcattggtaccaattcccaagcacctttattaattttttatggctgtcctaacttaccagattttaaggattttagcagaaatctatttattgaagccactgaaacagaaaagattcgattcttttggaaaccaatctgtaacatcaattcaactttccatatcaatcaagatttttccacctctttcacattgaaaaagaatgaagaaataaataaatggcaattattagagaatctaatagaagtcccaaaaaaattcaaagataaattaatactaaaaccaataaataatcagaatatttcagatctcgatattaaagtaacttcattaatcaccagattttacaagaaaaatggtaattttagctctactataaagtattttcaaagtattgtgaataatttccctttactgataaacactttggtggacaccaagttattaaaaggcgaaaagaataaaattatcaaaagtaattctattttaaaacagtatggaattgattttcatatgcttggaatttttattaatggtcaaaatatcaaattgtcctctttaaatcattactcattgctcaatacaatcttcaatgaatggaaacgtatggtccaattgaaaaagtatttattagattataaattaagtgataagacttctatcaatataaataccaaatcgttactaaaatattttacagacctctcaatattaagcttacgagagtcacaaccaattaaaattgaccttcatagaatcaaatcattttcagataatgttatttattttaatgatattgaaaaaaactctcaatacgatgaattaagtactgatattgaaagttttttggctgaaaaatctaagtttggagaaatacctgaatacagaaaaaactggaatgaaattatatttgttataaactttgataaaatttttcacactcaagaaaagaatgatttggaagctttgactggtttacttcgaagtttaagagttgttaaggaaggttatccccaaagaatcgggttacttcctataggtagttcgaaatcctctgctttattaagtaagatctacgattttaaactcgaaaatgatttagattcattgattactctccttgaggacatagcaagtggaaatattgataattcattatttagtgaaaactacagaaatgttcctgatacaaaatccctattaaaatcattggacattcgaatgactacttcaattattattaatggggaaatctacccattcaaatataattcttggtattatctaattgccaaggttattaagaaagacactgcttttttaaaaaatgaaattaagaaagagctcaaatctggcaaaaatcgcaaaaacattgatgtaagaggtattctgcatttgaaatcttcaattacaaagaatgaaaagtatacaccaaattatttttcaaatagtatatataccacaatggataacactatattaaccacgcacaaacaaagaattatcgaatgtataaataataataacttaaatatactccacactattactctttttgataattttggaactgttgaaggacttcagagattaagcaatctgttaagtactaagtttgaaggtgttcgtgttagaatattccattccggcgatttatcagactccacatggaagaaattgaaatcacagataaataaatacagggagaaatctgagcagttgaaatttttagactctttaactaagaaatctatacaagcaaatcacaacaaaaaatctctattacagattacaaaaatgaccctacataaatggttaccggatgttcccccttcatattttgattctaaattatttttggtattgaatggtagattcattcatttttctaaacacgagatccttactacaactgaatttgaatccataattaaaagagaatccaaaagaactttagacactatatttgcccttgaaaatatatttcctggattttcagaaacagcgttagacccagattttgttgaaatgatatctgctttattatcaaaacttgtttatcacggttcccaatacaataacgacgggtttgattttactactgaaacagtcttattaaggttcaatatagaacactatcttcatagcaatggcttcactatatttgatgatagtgatcacaattctgtagagaaattaattgatgtaaccattattgttgatccagtcgaagaaagaactcaaaaattgttatcatttataccgtttttagaaaaaatgaatattgtaaactttaaaatagttcttttacccactgaaaacttgccattcattccaaatgaaagggttttcatacctactattcctaataggttgcttaccaaggaaataataaatgcctttgatgttgaagtagatatacctgatcactttgcagtttctaacctttctcaattcgatggggtcatagttgagagttatgtgtatgattccaaaattacaataaatgagggtaacgttcatggcattggtggtctaagctttaatgttttagatgagcataatgagatcataactagttttacctcaatgagtacttttggatatggtcaatttatgatccacgatttccaaaaaaaatatcacattgtgtgtatcacaccaggatatgatgtagaattagtgtcaaatgaaatatattcagatttggttgacgagggtgaatttagtatctccaatttgaatatgaagagaataactatactagtgacaaatcatgataaagcaataccggaaaacagaatatcaatggaaagtactgaaataaatatttttacaacgttagctcattctgatttagaacaatccaacttcaagaaaaatgtattacaaatctgtgcttctgatcttactaaaaattttacattttggttgttagaagatgcctatatgaatgaagaattgcatgactttgctactattatcaataacatttctgatataaatgggaaagtaaaatttgtgaagtatgaatggccaagatggttacgtccacaacgttactgtgaacgtaaattggacatttctagatttttattccttgacgtattattcccatcagatataaaaaaaatagtgtatatgaatcttggcacaacagataatttattagaccccgaaaagattataagatccgagactaaaaaggctccatttagcatgtttaaaatggaagtggacggttactggaattacggctattgggaaaagaggttgaaaaacaatggatattcgttttattcaacagaccctgtatttttaatcgacttagaagagataagatccaaggatatcggtgatcttttaagaattcattatcaacgtttatcagcagacgcaaattctttagtaaatattggtcaagatttattaaatgacattcaaagtgaagtacctattagcggattaaaaagatcactaaagaagaataaattattactatctaccagtaaacaaatactaagtagatgggaaaatcagattatagaaacacaaaagacattacaaagagataaaaagacaaagattgaaaacactaataatatttttaatacactatcatatgataagttccatgatgaactttaattgagccaatcaaaatgcccttttgactccctacctgttccacaatatctagaaaaaagtataagaaagagccaagttttttctagtgatatgatcatcattagatgacttatatatattatgcctagcctctattaattaacgttttatctcaaatcttaatcctacaattgcttagtatcatttatatttatgtttaagctttactagactgtcggaataataccggaaacagaaattcccgaccttttataatttgtaaatatagtgcggcatctctgcggaggatttcttttaaaatcccgcattatataatattacctgtggaatatttgcgatattttcggttttatttacttacttacttatttattttttttctgacccactaaaccctctctattgtgatgatagatgaaacttttaattattctaagagtaaagtagacaaaaaagcacatatgtatattactatctgagatatcgtatctgggtaacatttttatagtagcaaaaaaaaaagaagatcatcactccctaagtttaaaagaaattaaacagcatatcatatactgccgtgaaaaatagacaaaattgattaacattcagatccaagcaaaatatttacccatattatttaagttgtgttatttaggtttatcgggatatgagatctcaaataaaccccaataatatgagaacggtaccaacagtatctgagctagttatatctaaacttaaggaacctgacccaacaaaagtatgtagtaataccgatcaaatttcacgacaagtacaacaggaagtccataaaaaaaaagaaatcaaaaaaacccatagttttaggacccaatggtaaaaaaagattatcatgttataactgtaggaagagacgtaaaaaatgtgatctagggtttccatgcgagagttgtaagaggcttggtattgaatgtaatatcaatgaagaagatttaaggaaaaagagatattcttctacttatgttcaatcattagaggtacatatagcatccttagagactactttgaaaaatctaatagaaacattttatcctaataatcaacaaatattggataagatgatgataggtgacatattacctgacactataaatgaaaataataatggggattccagtttaatttataaccaaaatattgaaaacagattgagacatgagcaaaatattaaatccaaaaaggataaatttacaatgttacctaatgcaatatttaacaatggcaacaatcccgaccacaacagcaccactaccaccacaaacaacaacaataataatagcagtattcgtaattgtactaatgatgataatcaagccaacaataatagtaggaatggcaaacacaactctacagtaacgattccaaccaaaaaaaaagtttatccagaatggaagaaaaaatcatttgtaaaaggtagtctatatcctgaaggtcctgttccatataaaccaagaccaaaaccacactcgaaaacttcaacaggatcagtgaattcaattggttcgaattcttcatcagcagtttctttaataggaagtgattccagtattgataatcgtcactccaaagatagcatttcacaaggtataaatgacattgataatcaacttaatcaggaaaacttaaattcatctaatgcaattctaaataaagataatagtaccgcctctaataataataataataataataatagtaagaatgatagtaatagtattgatgcagttgatgatagaataggagagaaaagaatatctgatttgaaaacaaccgttattaaaagaccagtaagcaattacagtaacgagtattgtattaatacagatccattaattttacaatcattatctaatttttacaggtggttatacccgggtcattttatctttgttcacagagaaagttttttgtatgggttcttcaatcatgcaaagaataattatgcagattctcattattgttcaaccgaattaatttatgctatgtgtgccattggatcaaggttatcacctgagttacagaatatgtctgaatggtattacgaacaaagtaaaaaaactttgttaaaattagtgttcgatgaacaaaatacagcatcaattactactgtacaagcattgttctgccttgcattttacgaattaggcaaaggctgcaatcagttggcatggtatttctccggcctggcgattagagtgggttatgatatgggattccaattagatccaaaggtttggtacacagaagattcaaagagtcagttaacagacagtgaattagagattaggtcaagaatatattggggatgttacattgcagatcactttatttgtttaatgttgggccgaacgtccactttaagtgtaagtaattctactatcccagaatctgacgaactaccggaagtggaaggcacagaagaattcaggtttatcggtaaacatgttttacaaatttcgttgccattaaaaaatttgattatcctttctagaatagtgcaagtgttcacttctaagatatttatcgaatctgatgacactagtgtaagagtgcaattattgattgtgtttaattcacaagtgtttcaatggcgacaatccttacctgggtttttacaatggagtaagaaattgttacaagatgaagaggtatcaacggacccgacagtgtcctatttctggtattattattatgttgtgttattaacgttcaataagccctttttagaagaaagcgaagagtctcgtggcgttgttattgaaattctggaagatttaattacattatttaataatttcgagaagaaattaggcaattacaattatgcaacgttatatcaattatttgcatgtctactagcaattacctgtttaaaaaaattactgattataaatgaaagcaatcgggattgggagaaacaattacgatttttccattcaatattttacgaaaaattatcaccagcatataaattaccaaataaattacaagaggatgataatttagaggatgaacaagaaaagcaaactgctttaaatcaagtcaataatatcaattacactcatgatttttcgctgagtaatgagattgatgatatgattaaagaactatttggtattgcatataacccagcacaaccattgtaaacaagatacaaaagcatacaaaaaacacaaactcatgctttatagactttaagcatattatttgaagatgttgaataagttagcattcattcatttatatgtttgctttatgaaattatttatagaccattctactaatatatgacatacagtatgtatgtatatatatgtacatatgaatatataacctgagaataatttcggaaaattacatttccgtatctacaaggtgattgtgaatgtatcggaattgtaaaaaaaaccgttgacaggtattccgaatactagaacttttcttctaaggaaaaaatatatagatatagatatgtatatatctataattagcacctgtattgttttattctctccctctcccctttctccgttggaatgatatcgaaatccattgtttatcaaatgggtccctttgtttttttttttttttttttttttttgtttttttcaaggggaaagaccatttcgtcataaaaaaagaaaaaaaaagaaagaaacaaaaaagaaaccaaaaaacgaaactggagaaaagttagagagtgcaaaaacacactctccttaaaaaaattagatcgtccactgatgtattttatttgacctcgtttctttttttttcggactaaattattctatacacaaaaaaaaatctagggttcaacacttttttccatttcaatatcatcagaatactatattctttatgttaggtttcgatatattaactgactactctggtgagacatgtaatgaaagcgaacttctgttcttttttttttttttttttttactattaaacctagtactttattattcaaaataatatgtttagtggagtacctatattttttttctacataagtgtatctattccttcatgtgtaactcttggttagattttcatatattccaaacaaatcactgttccaaacacatacactccagaataaatgtttcttaggttaaagtgacaggaagaagaaaaaaaaagggaacaactgctaaaattctcatttttagacacagccccatgatttcctaaataagaaaattgatctatctacttttctttccttctttgttatttttgcgggagcttacaaaaaaaaaaaaaaaaaaagaaagcaagcggagaattctctagaagtcgagagaaaaagaaacacagagccagccagtcgtcttcgagccctcgagaactgtctataagattgaatgtgtgaagtcgagtgttgtctgcgatgactccgagagggagatgtaactgaatgagtaatgcattcacagaataaaaaaatttggtaagaaggtaccctttcttctagaaaaaaggagagagagaaggagaaagaggcaggagaacggggctgtaatcaacattctatatcccatacatagaaacatattgttacatacatacgtatatatatatgacagactctaaaggggtataatagatcaccacttctcacttttcattccatctgtcttgattttctcttgacgttactatcttacatcttatgcttgtatagcagtttcttctcaaaactagacccttatatctttacaagaataaacaatttctactcaattattatcgtaaacacttataacgaagaaaaactcacattataccacaaattttataatagttattttttctacggttatggatttattttcaccaagacctgaacatactcaattagataacgatacaataaacccaaaaaacgaacaactaccaaaaataattccatctggttcattcaatgctgttacatcgactgttattaacaaaacaaaatcatcggctgaatcgaatggactaggtttcctattacctcctttgccattacacacaagctcgataagtaactacaacctggataacataactgttccagaaagtaccctggatctctccagttcttcctccacaacccttcaaaaaaatcctgggttcccatctccaccgcaatcaccaaaactttcaattgaaagaaaaactcaaataagtaaagataaaactaggaatagtgatgaaatatctccttctgtatccggcatcaatgaagggaaaagcataaatgcaacaaggttcaacctcgataaagatatattcttagtgagaccagattgggaacaagggttaaatgtaacaaaatataagagatccaatagacgattcatgtcgtactatcgcatattcaaggataaagataaagattctgccagtgttcttcctttccagagagaatacagatattcattaagaaacaatagatatagagataccaaggaagatgtagatcattattacgatggttccgttgcatcccaacgactcgtccccaactctaaatgtatcacaccatcatttgcaaccggtaaagaaccaaatacattgaaacagggaaaaaagtggatcactaagacttctataggaagttcgcctaaaaaagttatggtttattcgcataaccataccacaccaaatataaactgggaattattaccagattattcaccaagtttggccactttacctaccacaaatgtaaacaagtcgatgagagtagaatggaagggatctatgatggatttgtccaatgatccgttgagagataagctgcatcctgcagaattaaatttagcacagatcctaagattaccatgctcactgtatttagattcgaagagaagactgtttatgtcaaaggtagagagaatgcaacaaggcttgccatttagaagaactgatgctcaaaaagcatgccatatcgatgtgaacaaagcatcaagattatattctgcatacgaaaaagttggttggttagatgacaaattatttaccaaatatctatgatcatatacaagaaagtaaagtaaagaaaaagaaaaagaaaaagaaaaaaaaatacaaaactaacagccataagtactattatactcatttttatttttttttttattcaattattttaaaatatttattaatattctgtttggtcgtttctacatatattcatatatccatacttatatacacatagtatatatatatattttagtcatttcaaaattgatttaccatgtaattcagatctctgaggtttctccatactagtatttgtcacacgttgataatatgttattaatatatgctcagatgtatcaatattcgtattatttacaattctgattgacctacgaatttatatcactttagtcatccacatttaactcatcagtattgcccttcctctcttcacctctggttcacttgcactataaatactacaataatacacggttcttaggaaaggaattccaaacccgcatgtttggaaataaaatccatgctgttcccgtaaagaattattttcggaaaaaagatggcggctttttatcttcttttttttttttttttcactccatttgataaaaaaaagaaaaaaaaaataattatttctgtaattaattattctttatttcagaaagaaacaagatagacaggttaataaatgttccttacatgagtttgttttatcatgataagaaatagtttgttgtcacttagacatacatacgaaaggacacacaaacacgtatacacacacatatatatatccaagcatatttgcccaattaaagtgtaaattataatataaagaaaaacctgcaaattcatttatacgcattttaataaggacgaacaaacaaacaaacaaacaacaataaataaataaataaataaataaatcacaatgtcttcatctataatcacttctttgacaccaaatcaagttaatgatgaattaaataaaatgcaagccttcattaagaaagaggcagaagaaaaggctagagagatcaaattgaaagctaaccaagaatatgaaatcgaaaagacaaatttagtacgccaagagataagcaacatcgactcaaattacgaaaaaaatttgaaaaaaatttatctagaaaaacaaatcatgaaatcaactattgataatcaaatcagattaaaagtattaaataagagaaatgattccttgaatgaaatatttgaagagactcaaaaacaattaagagacaaaataactaatgatgaaacattgtacaaagatattttacacaaattgattcttgaatcggttttaagattgttagagagtcaggttgtcatccaggttaaagaaagtgatttacctattgtggaaaatgaagaatttctaaataagattactgaagaatataagaccactacaaatggtaaaaatcttaaaatagctgtatcaaaagattatttgagccctgaattaattggtggtgttatagtgaaagattcttcagaaaaaattaaattgaataatactattgatgaaagattgaaattattacatgaagaagctttacctgccataagattagaaatgtttggtataactaagaccaggaaattctttgattaatttctacgtacaatgctctctctctccccctatatatatatgtatatacatgtttctgtactttgtatgatttcatcttttatagtataaataataaatatttttaaccatctttcatctattatgacttaatatatgactattctgatactacatacatacatacataaagaaagcaagtatagttagtactcatagcaaggtaatatttgactatatttttgctggattatatttaatgctttatgcaaccttttcccgcggatgagcagctcatccgcgggaaacaaaaacaaaacgaaatccatctctgtccacgtgcaaaaaagatgttatacattttaacgtcggcgttttttttgttcgagaaaaaaaattttggcctctgagcatctgttgttatggtagcggcttcctgttcacaaaattccatatcttgcttttgtgttacgctgaagcaagaaagggaaaggaaaaatgaagtattgatgaactagatgaaatgacattgaacaaagtcacattgaaacaaaaaaaaaataccatacaacattatcaatcgataggtatgtgttcctagttttcagatttcacttgaaccacaaaactagtataacgctaccattctatcacttcatagacacgtataactgtcatcatcttcatatttccaattcattcctatccgtccctatgaccgcaatatgatacccagattgtttactataccattaagatatagtactacgggaaataatactctctaccataataaacgacatatattgttattactaaatcatcggttattcactgtgtatcggaatcatatccgtcaatgtcagaattctttagaaaaacctcaatctacactcaagaataatcaagctggatctcctttaaattctaagctattacaattaaaaccaatcaaacctaatgctcttttcatctcatgtacagtcttcaattctaaagggtcaatagtcaaagtctcgcaaaattttaataaatggaattttctaagagatcataatctgtttccaagagatttaagaaaaattgatacctcctcagtagacatcatcccaactattctggtgaagcctcattgtatccttgtaaatttacttcatattaaagccttgatagaaaaggataaagtgtttatatttgacaccactatccctgaatctgcaatgaaattaggtgtcctgatgtatgatatggagtctagactatctcaagtcaacccaaactcaaataatttttatgaacatagagcgttggaaatcattttaattaatattatgagttgtttggaggcagagtttaaagaatgttctactgtttgtagacaaatccttatagatttggagaatgaagttaatagagagaagttaagggaactgttaattaaatcaaaggctttatcttctttttatcaaaagacctttttaattagacaagtattagatgatttactggaaaatgatgacgatatggctatgatgtatttaactgatccaagaatacctcatacagatactgcaagcaactccatacctccatccttatcctcatccgcaccccttaaaataacatataatggcaaggaagtgaacggagatacacctaatgaaaatagaaaagatgcaaatgaagaagatgaaaatggagaaaaagatattgatttttctgatttagaaatgttgatagagaattactatacacaatgtgatgagttcgttcaacagtcaatttctttaatagaagatattaaatcaacagaggaaatagtcaatattatactagatgcaaatagaaattctttaatgctattagaattgaaaatcacaatatatacacttggcttcacagtagcttcactgttacctgcattctacggtatgaaccttaaaaattttattgaagaatcctcttttggatttcctggcgtaatgctcatctcctttttaatgggcttatttgtagttagagcaaattttagggctttgaaatctgtgactaaattatctatgtttaagacaagttctgaattagaatcaggccttgttcaaaagaccaactctaataacaatataaactcgttttcatttaataaaaaatattctgccaaactttcttcttcccattcattttctgcatcattatccccacaactttactcttcttccacaatctcaccatcttctgtacggaaacattcatatagaaatttattaaaggtaatgtggtggtcaaatttcaaagaagttttaattcgttattggtttggtgaaaagtatactcctaaaaatatgaccaatttaatgtcatcacatatcaatactagaacaagctgttctgatgaagaaaaagatgtagtttggaaatggttaatcgataataaaaagaattaactttttaatttatatctctcaaattttattcaactttgctttatatcctttaacttgatcttttattgtcttttcattccttagttccttttattttttgtaaatatttttcttctattatattagtgaataccaatgagtactgccaccattcactactactttctctgtgcacatagatatatacctttttagatttattttataaagatttcacttatagatgtaatattatagatttgaaatatactggataaaaaatatttattattcgtatctactattatatacataatcatacataaaaagataaaaaaaataggaattatttataatttcatttgttcagatcatgacgccatttaaatggtcaatttctccttgaacacagcactaatctcagcaacagcattttctgcttcagtttgtttgtcacccataccttgaaaaacattacctttaccaccagctttaccgccaataatagaagaaactttcttggctaaagcagcaccgtcaacacccttttcaatggcttcattggatatataacaaccatgagcaatcttaccttctggatcattaccagttaataggtagatagttttatccttagctgaagatttcaaatagttaacagcttcagtgatggccttggcattggttggaatattaatagccttaacaaaataggtagcgtccttgttagcttcgaaatagttcttgacttcatcaactgtttgcttgatttctttcttagctctagctttaacctcgtccttgaccactttttctattttattgaatttttcccttaattcatgtttagtaatcacagagatagacaattgacctaacttaacacctaattcttttaatctcttttctttagctggagagaacggtagcttttcagcagcaatcaattctgtttcaaattcactagagattctttgagcttcaaaggcttcggtacctgtcacagctacaattcttctaatacccttagcaataccactttcttctaagataatgaagaatttaatatcagaagtctttgcaacatgggtaccaccacaaaattcaatagaatagttgtaccattcttcactagttggatcagccaaaatatcttcaattggtttaccaacagaaactacacggactggatcaggataagtttcaccaaaaacagcacgaactgaagagattgttttagcttcttccaatggaacatccttatagtagacagttaaattagatttaatttgctcgttacagatttcttctatcttacgtaattcttcaagagatactgccttcttatgtgaaaaatcaaatcttaatttttctggagctacaagagaacccttttgatcaacttcaccatcaagaacttttctcaaagcgaagtttaagacatgagtaccggtgtgattattcttaattgggaaacgacgtaattcatcataagcagaaataaccttatcaccaacggataatttaccttcttccaaagaaccagtatggaaaacataaccattatacaattgaacattttcaacattaaattctgcaacatcgtctatgacaatcttaccagtatcatattcttgaccaccttgttcagcatagaaggatgtcttgtccaaaataataccgtattttttacctggctcatttatttcatcaacaaatttagtaccatcatataattttaagatagtagcttcaatgttatcaaaaccatacttagcagaatcatcagttttagcaacattttcttcatttaattcattcaattcatgaacatttaatttaatcaaagtttcatcacccttcttaccacctctcttagaagcttcatatgattcttgcttagccttttcaaaacctggaccatcaatcttcaaacccttttcttcagccattaattcagttaaatcaactggaaaaccataagtatcatatagtctccaaacctgtttaccatctaatattttagaaccagaagtttcacaggctgcagcatatttttcaaataatctttcaccacgatccaaagttttagcaaaagaggcttcttcttcatctaaaatttcgaaaaggaaagcaggatctttggcaacttctgggaagatatccttcacttgttctattaaagttggtgacaaagtagaaaagaaattaccgatagggtagtttaagtacttacgagcataacgagcacctcttcttaaaatacgtcttaaaacataacctctaccttcattgtttggaatacccccatctgctaaagcaaaggttaaagtacgtacatgatcagcaagaactctgtaagcagtatcaataccatctttatcctcatcaccaaacttaccagtgtattctctaacaccagtgatttcttgaatacgtttaaataatgggataaaaacatcagtatcataattggatctaacatcttgcaaaacagagactaatctttcgaaacccataccagtatcgatatgtttggcaggcaaaggcttcaaggaaccatctttttctctattaaattgcatgaagactaaattccaaatttccaagacatctggatcatcttgattgactagggatgaggcatttctaccaccaattctgtcataatgaatttcagaacatggaccacatggaccttgatcacccatttcccagaaattatccttgacatttcctggtatgatgtgatcatctgggacaccgacatccttccaaagttgtaaagcttctaaatctggctcaaggccttgttttgagtcaccctcaaaataagtgacgtataaattttctgatgggatcccatagacttgagtcaacaaagtccaagcatatgaaatagcttcctttttgaaataatcaccaaaggaccaattacccaacatttcgaagaaagtgtgatggtaggagtctctaccgacgtcttctaaatcattgtgtttaccacctgctctaatacatttttgagaattatgggctcttttcaaagtggagaattcagaggatggatcaacagtacctaagaagattggtttatattggttcataccagcgttagcaaataaaagagttggatcatcgaatggaacgacaggagaagatggaacaaaagtatggttttgttctttaaagaaatttaagaaagtgtcacgtacatttttagctgtccacttctgtttatcaccgacagtcattttgctagtcttattaaattgtatagaattcgtggtagaagtagtagtggttgttcttacgatagttctaaagtggttgttagaaaataatggtgaaacagaacgactgtaaatttgtctaataactgaagatgccgttttgtacttttgattatattaatatatatatatatatctgtgtttataaatactttctctatccagtttttaatgtattttgtttaatggaaagagggaataaaacgaacaaaaaaaaattagatatcagaggatatatatatatataccgtaatataagaagaggtatatgtgatatatatgtatgtatattgttttcaggttcgataacagtgatcgttgaattaagtgtaatcctttggaaaaaactagaacagtgagttagctaacaatcttttctcgaccattttctagtttgttttagtttgttttccacaactcatcgccagtgttgaaaagtaataaaaaaagaaaaaaaaagaaatttcttcgagcgacaataaaaaaataaaaaaataaaaaaaagaaacaaaaatcttgaagtttcctattttatatttaatttccttaaatggtaagctgtattcaaaagaggaaaccatgtgcttgatttgtcactacattatatataaacatacatgattgagtataaataaatattaatcaatatttacgacactttaaacatgttcgatttattgcagtctatgtataaatttgctagatttaatttacaggtatgaagtctgcacatttttctattctctctcctcttttcttattttataagtgattataaaaaggtaatttaagtccatgatagttaaacctttgattcatttactttttttaacttttcttttcttttttggttgaatttgtattatcatttatacttctgtggtttaataatgttgctattcgatatatacaaggaaagagaaataaattctctagcaaatttatatcaaaagaaggggtgaaaacgaaaaggtacatgagaaagatagaagtataagtctgtaaactttgttctccatatgaaaaagctgctgttatatcaatgtctatgggattatttaaaagaagcacaaccctgattataaatcgttatgaaaatgaataactggaaaggtaataaaactgttgtatagtctgtttttgctggcgccaaaatcacacactaaatcttcattttctcctgtaatgtggtgtacggatgtagttcccccttcgactgcgtacctgccacataccccttattttttttttggtgtgccttcgtcgtgtctctatttatataatttcctctttcggaaatttcacaaattttgatttggtcataaagtgacccctgtaaaagaatattagagttaatacattttacaataagaattataagaaagtacatcaatttataattggatatgctatattaaaaaaaaagtaaaaattattgttattacagtagactattctatatttgtatacatattaagaataataataatatatgaatatcttctaggtcaacaaagtttagacttctttctatatttcttttccagatctctttgttaactctaatacaagtttaacaataataattatcccatcattacttgtttaagatatagtttcaaattatggagaaaatattacaattggatgaaccgttagatatcccactttttgatgaggtagtatctgttttctatgaagggaaaggaacttctcaagaacagagagtggctggtgaaatattgagtcagtttcaatctttaccaaatgcatggttacaagtagataaaatattggactcttcaaataaattacaaagtaaatttattgggttaaatatcttggagcaattaatcacaactaaatggaattctctaccaaaagaacagcagtcagggatttggaatttcttaataggaatgattttagcgtcaagcaattcaaatacaaatatcgagttgacacataaagcagattatgttctaattcaaatcttgaaaagagactggaatgaatctttgataaaagatctgattgagagttcctcggcgtccttatccctatgtcaaaacaatatgtacatacttagaattatagcagaagaaatacttgttaacaataatagtggtagtagtgatagttttgaagaagttgattttacaatttcaaaagatttgacgaaagcaaaaatattcaaattgaaaaatgctttatttaaggatttccaatttattttgaggttctgttatgaagtgcttaacaatgtcacctttgattccaactcaaataatataaaagatataatttcgttggctaatagcaccataatcactttaaatagatatttggcttggctgcccattaaaagtgttatggattcagatattgttactcttttaattgaaaagtttttagtgcaaaatggcactagatcaaatactttaaaatgtctaactactttattcaatattaaaaaccctaactatgtatcaggtattcctgattttgaaacgacgataatccaatattttaattatattcttcaaatcatcagcaacaactgcaacgacaatactaataacaatatcctttttctagaatctagaacaaatttcaatgatatatatcaacaatcaaaattagaagatcaactatttatacaagattgggaaatatttttgtgtacatttttgcattgtcatagatcaattatagaagggatttgtaaagatttagcaccccagtataataaacttcttttaaaagcacatcaatacatcttacaaatgactacaataaacgataaagagatatttaaaattgctttagattactggcatgatttagtctcttcattatttattgaaatcgaaaattatccattcaatcaaattaacccatatatggatgaagtatctttaggcactggtgcactaaatccaagtcttttgaaacaactccctttaaaaagaaatttttattctgaaatttgttccaagctacgtgaaattattattaattgcatggtaaaacctgaggaatttcaaattacaatgacagaagatgggaatttcgtcagagaggtgtttactgagactgaaaatattcaactgtatgaaactgaaagagaagtcttggtattattgactcatttagatgtagaggatatggaaaatcttctctggaagcaactagtacaattaaaagaaaacaatatactcttcaaaaatagtggcgaacactttaataaaatatcgtgggctattggttcaatttctggtactatgagagtggagacggaacaaaattttcttattaaaattttaaatctatttggtgaactttatatggcttctttaactaaagaacaaattataatatactcttccaacatcatgtatattgtaggtcaatattcaaggtttttgaaaaaccattggtcatttttctacaaagttatgcaacaattatttagtatgatgcacaatgaaaatgatgctattcgtgatatggcatgtgatacattttataaaataagttctaaatgtaaatatcaaatggtgaccatgcaagagtgtgatcaagaaaataagccttttattagagtgattttagaggatatgccaaatattgtaccggatttgaactccagtcaattaaacagattctttgaaacatgtgcaatgatcatcaatcaagagcaagatttttcaactctaagagatctaacagtaaaattaatgagaaatgaaaatttgacttggcaaagaatagtgtcacaatttcgtctaaattctaaattttttttagacctaaacaaaaatgactctgacgtcaatgagtttaataattgccaagccttgattcacgtattgagaatcaatatatctgtatctaaagctttgagttataattactttgaacaaatgcaatatatttatttagatatgctagatatttatgttaatatctcaagtttaataaaagatgctatccaacaacaaactagtaataatactaataacaataacaagataatagaaactccacagataagactgtttagaattattaaaaaagaaattttaagattaatgcagtgttttatccaaaatacaaaagattctaaaattattattctggatattttaacaccttttatgaatgcaactctaagtgattatcaaaatagtccttctgagttaaaggaatacgaattattaaaatgtttaaccatcatattacaaaaatgtggtgatcagttaattaatcatgtaatacaactatttcccttagttatcgaacctacattgatgatgattaacaaagatatgatcagttatccagatcacagaagagaatattatgaattactaaatgctatcgataagaattgtttccaagtatttttagagttaccaatatgtagttttaaattattctttgattcaatctgttgggcaatgaaacatacaaatagagaaattgaaagccttggtattgacagtgcattaattatgttgagtaatattgatactcattatcgtgatacaaacatttttaaagtattcttccaagagtattatctttctttaataaatgaaactttctatattttaactgaaccagatcataaatctacattcactgaacagtccatgttattaacgaaactaataaatttatcattcaatgatgatatatctgtgtctatctatgaaaaaattaatggtatagcacaagatactacaaataaagactatcttatgcaatatatggccaagctattgttatctgaatttgataacttgaaggaagaacaagttagaacgtttttaaatgtattagttactgagataggagacttagatttgtttaagactacattaagagattttttggttcaaatcaaagaaatggatggtgatccaacagactacttattcttcgaagaaagagaaatggaacttaaaatgcaacgtaaatctaaagaggaaagagcatctagaattgcaggatgggcacgttcttattaacattatcattaatgtacttatgtatacatttatatactggtgtttatgtttacatttatttgtatttacatgaatataatgatagatagtgtaatgagtaaagaagttgaaacacaagaaaatcatttgatctttttgttttttagtttaatggtttcattgtttacataaatccctttacctttataaggttctggcggatggaaatctcttattttggcagctatttgcatgacttgttgtttgttacaaccttctaagatcaaagttgttggggcaggcaatgaagcagtgattccttcaggtatatccagtccttgtggaatggaagcaccgacttttacacccacatattttccatctttttctagttgggccctataaccagtaccaacaaactttaaaatagccaaatgaccttcattgacaccaacaacatgattatttaaaagagatcttattgttccccacatagacttttgtaatttttgttctggatttacaacagagactttaattcttctatgttcttcatcgatatcaatattagaaaatgaaggtatctccatttcaacttgtccctttgggcctttcacaatcaccaattggttcaagacaaatcttttaatcccattctgaatgagttttggggggtttaaaggttctactttaacttgcgtctcaggagtagtgaaaatgctaagactgcctatatgtgacctcaaaaatacagtagaagataatggtctcttggacaaatatcttgttaaagagacctggcttgatgatataacaccttctaataacatgattggactatatcttgtttcctccctttttccctgtatgcactcgtgtccagtttcttgctttattcaaagcactgcgaaaaaaagagaaaaaaactagcagaatacagttatattctaaatttaatttcaaatctatcaagtagaaccaaactaaactcttcctcgttttaatgtgcttgctctactttctctttttctctctttgtttgtcttatcatctgttttcttgtctccttgaacaaagttccaatcctcaaaagatagacagcaattatttttcataaatttccaagaattcgaaaaatcgcaaatttttttgtaaaacctcatcgcaaagagtttttatctatttcaaatgtatatgctacaattgtgtatatgttcttgtctgtccaacaaatagttttcgtgaaagtaatcataaataacaacacattattattactaacaagtaagctaaacatcattcacaggtacccagtaataatagtagtaatatcaaaagcaaaatggttagaaaattgaagtatcatgaacaaaagttattgaagaaggtagattttctggaatggaaacaggaccaaggtcatagagatacacaagtgatgaggacatatcatatccagaatcgtgaagattatcataaatataacaggatatgtggtgatatccgtaaattggcacacaaattatcacttttatctccaaccgatccatttcgtcataaacatgagaaacttttattggagaaattatataatatgggtatcctatccacaaaatcaaagatatcggatttggagaataaggtcactgtaagtgcaatctgtagaaggaggttacctgtaattatgcatagattgaagatggctgagactattaaagatgcaactgaatttatcgaacaaggtcatattagagtagggccaaatctaatcaatgaccctgcttacttagtaactagaaacatggaggattatgtcacttgggttgataattctaagattaagaagactgttttgaagtatagaaacgaaattgatgattttgaatatgcataaacatatgtatatacacttaaacacatacatatacatatatatatataattgtctctgtaacataaccacattcaacagaaaggttttttattaggttgtttaacattgtgttcttaggtagcaaagctacaaatttccaattttgtttgattgtttatataacattttatagttcaatgtaaaatatttcctgatacagaataccgatcaatttttgacttataagttctcattatcagtatattattggttgtctctatttccttcttatttgcttatttaatattataattattggatgagcctaactgtttacgcaaatcttcttgtgatccactacgtggtaatattccacccatactaggtggttgtatcatgtcattattttccaaaatgccacttacccttgaatgaatatgttgagtgtatggatccccttgctgctgttgtggtcctaggtttcttattgatccagctggcttaaaagttgtcgatacttgtaactctgccgggttagtcataacaatacatttcctcatttgataaggtgatgcaatgttgctcatttgactattattacttacaaaactcatagaggaattattaggatactgtggttgttgttggaaatgtccattatatatttcatcagcattgttggaataaaacatttctggatgatccattgggttcactgcagttccatttattctagctggttgaagaccaggtaactgtagttgtgattgtggttgttgaaactttgatgcttgtctgaatgaagtcaatgaatgagaagaatttgaatggattaactttgctggtattggtaattcatctatctcttctaatgtttgcggatgtacatactgtgaaggtatgttcggtagtggggggtagttgttatagaattgtggttgttgcatgggtatattggagttataatcatatccgcattgttgttgttgctgtactggtaattgtgatgaggttggtatatatgcagaagacggaatttctgagtatatagaagatgcaactctatgggaaatacggttatcatttaagtcattatattcattatccttattatgctctacatcttgttcatcgtatccttcaattttaacttgtgatttatttacattctggttttccaatattgagttagaaagatcatgaatagaagacgttagattattagaaaaatccctattattatattcttgtggatttacgttagaagatatattcatattattcatatcttcatgatcatcaacttttttattggtaagttcatagatattctcatctttatctaaatagactttataaatactcttcatcctttgtatgttttcttcttctaaggataaaggcaaggttgaagcatattctctttcattgtctaatcggtgtcgatcagtatattcgtatttattttcatctattttatcactaagtttttcttgattgatattactgttattgtgattattattgatgttgttgtcatttgtaatattatccctatcatttctgtattcaaaatcaaaattatcctcatcttcatgatcaataggttgaacattttgtacaaatgttaatttctcaggatccatatttacaaaattattcttctcttcattcttgttgattgatgatacatcttttaaaggtgatccgttctttgaattaaaagttgatacaatatgaccatttgtggaaccatttgtaattatcacaggattagcagacccactatgattagttattacacgcatattagacattctattcactgaggtaagtgatgcttgatccatattcatagatctattatgcaaggaaagttgactaccattccttgaagccaattgatatccgcctaaaccatcattttggacctgtttagcaaattctcttagagattccacattctcagtttctggcaactggaatggatcagtagtccacgaagaatttctattactaaatgggtttggcattgggtgtggatattgttgtatagcggcacttggtggagccataggcatgtcattataaaatgcatgattattcttttcggtaatgtattgatttgaatcacttgaagaaagctgatgattaatttcatacgtgttatgttgtggcaagtattcagaatcaccctcaaattccggatcattatcttcttgttcctcttttttacttctcttatagattatatataagattatgcataatagaatagcgacaaatgcaacgggaacagcaacagcaacacctaccgtgatagaagtggtacgtttattatttgctggtaattcacattcttgtttagaacctgtacatttagtgttttttgtttttgaggcacttgaattgttatcactactactatcagcccttctcactaaaactttagtaggagtaggacgaaatgcatttttatatattgtcgaataagttatgaatgtagatctcaatgtatcagtatctaacatggtttttgagattatgtgaggaattataacaatatgttttacagaggggggtatagtcttgtctattttataacgaacggatattaattaataatgaaaagtaggagaggggggagttatgaagtttaccaaattttgttaaagcgtgaatattatttaattttactataaaaaaaaacaaaaaattgttcttatgttataatagactaataagcaaaactaaaatataatgcactattagaaatctctatctaaagatgtttctcttttaaaaagaaacaaatatttgattttcttaattttatgattattcaaactttcgctttgcttaaattcttgaaagaaaaaatggtattaatcagaaggctatattctcaaatatcacacagagtaggtataggaagaggaagtgttgtaacgtcttcaataagagaccataatcatttgatgaaagtttttgaccggctgtcttggatgtaatttctttatgttctttctttctcgagaagatccgataacacctccccacaaaaaaaaaaataaaaataaaaaaataaaaaacagaagaataaaaaattcgaacaacattgtttaagtttttttttttgaagcgcgaaaacgcgaaaataattgaagtaaaaaactaaataagccttaaatacaaaaacttttaagtagggtttgaattttaaaaaaaagatattctggttaataaaaactcttttagttagggttgttcaaatttttgttctttttctcctaattggaaattaaagaatagtcattaatataaagcaaggcaaaaaaaaaaaaaaaaacagaaaataaggaaaaataagaaaataaagcattgaattttgggtgataatattaattaaatggttccaatatatggaagaataatcctagcaatatcaaactaggtggaaacagcggaaggtcttattatatttagacctcggaaaacttatttatatatattactattgtgagtgatattatgacagaaaatgtaaatgaaaaaactgctgctgcgaaagacaagggaattatccggaaatttttggaaaataaatatgatcaattattgaattctatattagatgtcactgaagatcaaattgttttaaaatctaaactagctcattctgacgtagcagaaaatcaaatagatagaaaacagaagagaaaattaaaccacatagataatttgttgctagatagggaaattgaagggttaaattatttcacagaacaacaaactgtagtatccaaccccacaattaataacaaagaacttatttatcatgcaatatccacttttataaatgcatctattgataagataagattagatagaatgacaaaatcattttcattgccagcaacacaagagaaaaatgacacttctatagacactatcttggagaatgatactttccttgatatatttatggagagattattatctagaattataagagataagttacccgaaagagaacatataactgagaaagaaacttcacataaagaaaaacatgctcaattggtatccccatctattttagcatcaaacttggggaaaatgtccaaacaattaaatagtatttttgaatttcaagattcatttattagattattaacttggaaaactccttcctatactatcttaactttacttataatttcattaatccttttccatccattatacttaattctattacccatactatatattgcatatggacttattacaccaagttacactcaaaaacataatttgagaaacttcgattaccatttaaagaaacaatatggtaaatctttattagaggtaatttcatctggtggcaagccagtagcatgtacatcaaatccatttaaagatcagataaatgatcctattgaagatcttaatctagtagattgggaagattccaactctggattaaaatttattactactattcgagattttcaaaatatgacaacaaatctattagcattgacaaattcaatatctaaatttatatatgaaactgcatcatttaaggacgaaaggaaaaccactattttatttctaaaatgtatagtgagttatattttattcaaggttttttcttcatggataaactggccgctctttttcagttgcttgatttggttattttttatgagtttgaatccaaaatggagatcaaagtttaagtatgctgtagggttgatacagcagagatctactacaaaaaaaaataatttggaaactgtaggtcagaaaaatgagattggtaatatcattattgatactactcctcaaataaaagagattgaaatatttgaaatttatagaaaggggcttatcccaggtgaatggaagttttttttatattctaataatgttttcgactataatgatcagtatagaaaagctcaaaaatcaccacccggtgttaaaactttagacgaattgtatccaccgaagacctggaaatttgataacaattctacatggaatattgataagaatgttcaggagtgggcatattacaggggactcctagatttggagattgacaaagaatttttatgtgataatatgtttaaaagacgtaggctaaccagaaaagtgttgaagtagttgagaacaaaaaacaatcaatgtgaaaatcgtttttgttttttagtagtggtactgatgatgaattatatattcttttataataatttataaaataataatattgatgagagatgcaaatattgttgaaattgcaatgtttttacttaataaaaatttgcattaaatgcagaacaaaatattactgagagaaagaaaaagaaaaggagaaagaagacatgtagtagaattaatgaaaaaaagaatgcatattatttttttgtcttgttctgtcatgatggcacaccttcaaattcagattttgatacttgactgacaatagttctccagtttttacgattatcatgaattggtattgttaacaaacttaaataaaatacagctaccaataataaaaaggatacaatggaaattggtaaaatcatctctaaaaaatttctagttgaaatttcgctacggtatggacacattgtattttcaccaattacccaacaattgctgacggaaatagaatttaaattgatccaaaattctttttcatcataaaacgagaaatcagaattattaagataaaaacttaatgaaagactctctaacggagtgataggtaatgagaagttataaccatcaggacatggcgaattaatgttatcatcaaagtggaaaaaggacatttctgatgaagtcacaagccaatcatcattagtattatcctttttacatagtccacttaatttattgtaacaatctccaacataccatgttaatgtggagtttgaacttaggtattttatcttggcacaattatatattttgatcgaatccttacccattaataatttcgagttggaaagtcttggttcattattcgcccatgtccaaacaatactagggatgatcaacttaacaatggttgtaatatttgaaatatcatacgggtttgatataataggtgataaaccacaatcaatacattttgtaatatttgttggtgtgaattgtgaattaagaaatctccatgaaattttttgcatttgattaatttcactattagttcgagggcatggtaaagtagaatacattgtttcgtaatgtaaagtttcgccaggaaaaatataaggattttcggtaaggtttaattgggaagttatttcagcaattattaatctattgttatttgtgaataaaaattcttgtgctgttggccatcttggaatcttcgtaatggaaaaatttgcatattgatgtgacaagaaatctttgggagtaaaaatgtaattagaccctaaataagtatcgaaaagatgtgtcatattagtagtattgctggaatttgagtttattgtcacattggtgttattttgaatattaagtaaaagcacttgaatatttgccgataaatcataatgactctctatcagaaattgttgtaaaatagttaaatattgctgaaaggttatatttgtctctactatcatccaagtattatttctaatctctaaatctagtaccatagtttgtaaacctgtattaaataaggatgataaattattgaggagtgcctcggtttcatttactttgaacaattttgagctatactgttcattgacttcatttattctatctatactttcttggttgaataatacttttctcaagtctactccaacataaggtatctgatcaattgttatgtttctcataatatcacgttgtgatctgatagcattttgtctttggacagagattgatggccatgcttcctcattgaagaaattggtgatacttgttgctgaacagcatcgtattatgacagtgtgaagaaacaatatccaaaattggatgataatcaaccaagttgattttgccattatattcttttttttattatttatattattatgattatgaaaagaatgaaatgtttatatgaaattctgaaagacaatatattattgttattcttctgttttaaatattgatgagcaaatatgaaagtttaacagctgtatgaaaatggcagaactctaacaactcattggaatgacaaagtaaagaatattacaacctgctgtggtagttgttcaaaagttagtagcatttattaagtttcaagtagaccttcagctcttatccatccagtttatcctattttatgttatattattttctgtagagaagttagggttagacgtaaaaaaatagggtaattgtcctaaaccttaattggaggttacaaatttcctgtttgggttgctatttacatgttatcccaaaagggtaatgttagtatatctcatttacctaatcaagtaataattacaatgcattactttgtagatcagcccatcgagggagagtgaaacggaggagtaaaacataactaagatagagtaagtatatatatatatatatatatatatagcactgaatatatttgagctggaagttttaatatatatttaatatgcttaactgaaaagaaatattggcttgattgttacttcttttactaaggagacacttttagaaggatcgaaatatattgtatttgggaatttataaaaatataggtagaggtaatcaaaataataataatggtgaaagaacaggcagtgtcaaaatgtaatgataatctaaaagaatctgaaaaagataaattaagaaatagtgataaaaaggttattattaatgatattaaagccaaatgcaaaccgttttattcacttcataaatctatatataatacgaaaaattctcaaagaataagtagacaacgaataaaatattacaaatcacctacagataaactgttgtcaccatgttccaggaaactagatagttatagatctaaatgtattgtagcaaaatcaactcctatgaaattatcctttagttctggtactgaatgaaagctatataattattaaatatgcttgatattttttaacaatgcaattgattaagtagatcacctaaattattgcaatttaataaaagttgttctatttctctttcattcaaattgttttcctggaataattgcatcaataagtttttcacaaaatattcatcatctaaataggtctcattggatccatcagtagaaaaaaaatcatgttgaaagttaatagaatctgatagatttttgatccatttgcttaaatttacgttgttttcaatataatcttgtctctctatcatggattgttcggtgatataaatatgatacggtgaattaataactttagtagggggaaataacgtaattcgatcaagaatcatataccaattatgtaatggaataattaatttagataagtttaaatttattataattgaagtttcaggatgtatactaataagtatatctttaagaatacaaaacatttcattttgtgcaactttaaataatctattttgaatctttgttttataaaactcgtcccttggattgtccaattttttattttgtttagtttcatttataatgatttgcagttgtgttgaaagtaaggatgtgttaatatcaaccactaaaatttttggatttaaattatcctgaacgattttatcattttttaaatagatcttcctggtaatttccatcttatgataaaacaaaaaagaattggtttcgccgatattatataatatcttatctgtacctctctcttagtccacccatattaatctattcaattgaaaagcaaggctgtacatgcatgtatatgtaggtatgtaggtgggtagatctggtcataacagttattcaagagaagaaagaaagaaaaaaaaaaaggggggggaggagaggagataaatgtgatagtttttgtaatacagctgttagattatagagcaacaaaataatagtaggataaagtaatatattttaaagcgctaataataatattagtatgatatcataatagtattttattcaagaaggtacatagtgaaacaaagatgaaaggttgagagacatttagagcgcggtgctagttgacaccattataaagggtttataaactttaattatatggagatacattaggatattaaataaatatggtatcccaacttttaatgatgaactaatagctttacaaaatgtatttctaacagtatcctgtatgcaacctattggtgtatatatttataatgtgtaattacatgttttaataatttgtgttctgaggctttggaatatctacggttataatatgtttataacacccccattctcggtttcaagtcaatacagttatacatatattgaaagaccgagagattatacatatgtacagaaaaattagatagattcaggtatgaatgtagatagagatattatggctttatttagcaaaatgttattattcataactgcaacgcgaaaataatgaaaagaaagacacgtaaaaatcgatgagatgcgcaagtgtggaaaaaagagggggggggaagattaccactggaaaggtccgaagtttcttacaccaggttaatccatcttaaggcatcgtagaatatcgatgtcgtctagtaatattggttcaaaagtatcctgtacaacgttctttacgaattatcggctgtcttaagattattttctgaacatagtcttatattttcagtactattttctttttttttctattttttcactttttgataaataaagacaggaagataatgtttttatgaagaaaaataatttgtaaatattcacatccacttgtttgattgtgattcaattatgccatcaaatttgtttcgttgctttaattttcttgtaatagaagatgataaagaaaataaggacaatttacaagaggtcactaatcttttaaaggatttcgaatacaacaatatttattgtttccatgtgaaaaattcacctaatctaaataattataattctattaaaaaattttttataaaagaatataactataaaagtattcatttcattatatcaaataatgtggattttctattttatcaagttgctgcttttgattatttgattcctatagtgtctctccaatggattgaacaatgtattagcagaaaccatctgttaagaactttaaatttctctcctgatccaaaacatctcttaaaggataccactatatatatagttaggaacccaaccatgacacacacggattatagattttattccgagattgtgacggcattaggtggtgtttgtttagatgtattaactaataaagtgactcacattatatctatttcatgtttcgatccaaatatggtaaaaatatatccaatgattaaaaatatagggaacactaaaattgtgtatcctacatggcttttggaatgtttcaaaacatctaaatatgcagatgaaagtaaacataaggtcgatatggctataaatgatgataacgataacgacactaggataaatattagttatacacgtattgacgaacgatttgaagatctatgggaagatttggaaaattcctctgagctttgctcacagtcaataaagaaaaaataccttgaaggtcatacctttataatagatctagatttgtctctatcttccaaaatttataaatttttgatccagttgatcaagttttatggtgggaactttgtaccttatattaaacttgatgatatagaaagtaataaaaatattgattgttttattggcgaatcaattaacacgaaaagttttgagttgtgtaaaaaaaaaggtatctatacgggtaacataatatggtttttcaatatttggttgtttgaaacattaattgatccaaaaaaaaagatgatttggagtccatttaaatctaaactttttaaatcaaaagatttgattctaagtcatactaattattttggtcaggaaaggatatacattcaaaaattaacggagattttaggaggtattaccacaacatctttatcttcccaaaatacacatcttttagttaaaattccctttggtaaaaaatacttaaatgctactacaaaaaaaccaaattgtaaagtgattaatcatatttggttggaaaaatgttatttggagggggttattcttgatactgaccaagatttatttaaagattttgatatctgtcaaaaaggtttatcttattttttaaatcaaataggtaatgatgacaattcacatgaagcggacaaagatgaggagaatgcttcaaaagtgtatgaattatttgaaaagaataacataactaatgatactttttcatcaggtgaagagactgatattggattttcaacagctaatgaaaatcaaattaatcctttatttaattatatgtcaatagaccgaaaggaaaatgttgatacgaaggaagatggattaaatttaaataagttaaatagcaagagtgggtttcaaagtgaaaaggataatcttgaatcaaaccaagtggaaagctcattacaaaataaaaaggataataaggttgagacagaagaggataaatatcaagaattatttggttcattatctgaaccacctacaaattttaatacaaacagcattaatgataccgaacaaattattgataataatgatataagtagtaacaataatattgattcaaataatagtgggatgtcacatacacctttggtgtctaaacaatcattcataagtgaggataagatttcacgagcagatagggatatgatagttaatgagatagataaattaaccaacaatgaaaataaattatcaaaaactctggataaatcattgacacaaccaacagatgatattcttgaacaatataatcctacagagacatcatctagaaggcgagcagccagagcaaaagcagaaaaaagattgcatgaagacatcgaatcattgaatgaatttgaaaggaacaaaaaaaagaagaggattggagatctgttaccaagtgaaattgaaaaattagagcatataaaagagttgaagaataaagctaaagaggttgttttatctatgaaggaattatctcatgagagtaacaaagaagaaacattaaagaagttgaaacactcttataatgttaaagcatttgttactggttgtcacgatgatataaatgaactggataaagaaattttatcacttatggggatccaaatcactgaagattataaatcaaagttgaactgtattattgcaccaaagaaacttcgtacagtaaagtttttcaatggattaagttttcatccattagaatatatattaactccagaatttattacaaaaatacttgaatatgttcatcataaagaaaatccagtgggtgttataaaatgtgaggatttcagattacaagaaatagataatgaaatcttggaaaagacaaaattaaatagtaaattatttgagagagcttatatagcaaacgttaatataacatcagatgtcactggtgggattgaaacgatttcatcaattcttatgaatcatgggattaagaaggttcaaaggataggaaaaagtccattattggttaacaatcattcccataaaagaattattttgaaaagggggaaagccatacatccacccagatgcgttattatagctggttcaaattctaatgtacgtaaactgaagaaacgatggagcactatgaataatgacaatatggatggattgctcgttgtcacttgggattggtgtgtacaaagtattttccaattggacgtcgactataatgaaaaaaaagatgttttatacagttccttataaaaacacacaatatataaatatagatagatatccgagttaataaactcataaagtactgattcatagaaagaaatataatgtactatttgctttgagtatgtaccgtacaagatgagtgattatttgtttactttccttgtgttttcgttctgcaccggtttatgttttcttttattcttctgttgtattgctgtcgtgttttatacagactttggttgtaaaaaaaataaaagtgagtttcaggatggtaaggcgctaccgtttggtttcaggcctgtgccttttttcttttcttttttttatcaatatttgggcggctaaaaataaaataatattcatatcttgaaagttaaagaacaatttattaaagtctacatgcagacaattcttctattagtttagaaaagtatataagactgtatatttgtttgggaattataagaaagatagcaaaatacagagatttgcagaagtaataggaaaaagaaaaagagaaaaaaaagaagaaaatgaatagtaaagatgatgtacagagagaagaaattgtgccaatatgtgtattttgtagaaaatataatatttcgaataaaagagccatgtctattggcattgataattcaagtattgaggcaatgacagagcaagagtttgaaaaaattcttttcttatgtaaagaaatggaaaaagaggaaaacgcaactacatttgtttctgaaaccgatgatacatctgttttagattgtttatctatggaaacaactaaattcaaggcaaaacgtcctttaaaatcactattccaggaagatttccagaaaaatgggttctcaaaagacgactggaaacggtcaaaacttggtgattgtgtatattcaaatatagaaaacaaatatcaactgaataatactttactgtattccgatattacactctcagaagcatgctttgaattattagaatcatctgttcctccgaacaataataaaagcaatatgaagcttttaatctcagatgacgttgaagagcaggaaggtgtaacgcagactttactttacactagtgagttgtgaataacttaaaacctagccattcgagggtaaaaacatatttggataatacatgttcaggaaatagagtgctgtaaaggggaaaaaatatctgtacgttctattttttgtttgtttataccgataatatagacatatttttatatgacgagatttgttaaatcgaaaaatatcactaaaaataacagaggtcgaaaaagaaaaaaaaggaaaaaaaaaaaagaaaaataccataataaaaatagtttgtgtttgatttgttgaggctggaaatataaagaaacctcactgtatcgcgcttaaaataaataccatgtcgtatggtaaaaggctaataccaagaactcctcgtttcctctgtagtttatcaattatattttcaacatcacatttaatgtagattatgcatattttattgtcaaagaaatgaatcaatttgatagatttatagaagagactgaacaaaaatttaacattgatacaagctctagaaaaacttcaataaacttaattcatcgtactgaaaaatgtaaaagaagtaatagtaataatagcatgaaacctattaataataactatagtatctgctctactgtaactactcaatctgagcctcgggattctgtaatattgaattcagaaggttccagcattagtaatagtagtggtaatagtaccaaatctattctagttcaaaagccattaacaccagtaagaattaataatttatgtgatcaaccgttaaacaataatgagtctgaaaagtatatacgatatagcatagctcaggataccgttgatacaaacactttacaacctggtaatcaaaatgatcacggattaagggtagtctcatcttcaaagtcagtaattagtaaaagaagatcattaatacagcctataatagtacataatgatgataaccataagaagaatatttcaggtggtagtatagatataaatcaaaattctcttaaaaatatagaaagagctgttgcaaatgaaaatttgactctatcttcaactgattttaatattactaataattgtattgaaaattcaaatattttttcctccctagttgataataacaatgttgatgacttactaaaaaatttggccaataaagaattagaattattggaaagtaagagaaatatagaggaattgaaaagaaagttgttacatcatgagaaattatatgaacaacaatatgatgacttgaaaaaattaaaggctgaggtatccagacatataagtgataactccatgatgaatatcgacagttcaaatatttcgaccaagaagggatcaccagttagaagggaaataatccaatttactccagagaagctttctcctgttataaaaaaacaacctgatgatataaatattaataaagcagagccatcaattagtcccctagctgtaaagaaaagaaatggtacaaagattaatatccaaagagacacaacaagaaaaaatttatcagatatgacaaaacattcacacactgctgtaattaaattaaatcctgtggattataatccgcctaaaaaatcacaaaatagaaatgaatcaatgtggtctaaaccgtttgcactttttaaccaatttgatcagctattacaaactgaattagaaaagtctttgaattgggataatggaacagagaatgcgtcaagttttattgaagagacagataaagaggagtctagtgagatagtacgatccgatcttgatactaagaatactgggtataaatcaaatccaaatgattatttacataaacaatcagcaattgatagtcgccagttacaatctagtggccagtctttgaccagaagtgtatctacatcgctatgggggtttgttaatgatgtgaaagaaggtttactaggtacttatgaacttgtggatgatgataaaagtagttcacaagacaccaccaatatgaaagagtttaacacaacgagaaaaaacgatcaagtaaatagatctgttgaaatggcatatatttagtatataatatataaatttaatagaatattaatgttcgttaaaagtagatattggacttatatcccatttattttttttctattttatagcttatcattatttttgtttgttgtttgaataggataacaattggtatattattacaatcataaatctattaaacttatactattatagatctgtggttgttgttgtgtctgtgttagatattgtgaagttgttaattggttgacttgtccattggcctgtatttgttgtccttgggggttattgaccaaagaaaacggattattagaaacattgtttggaactttattgttaacttcattattagactcagtatagtttgttttggagaatggattaatttcttgtctcgattgaatttctttctctatattatttaatgcaaatggattgtttgatccagttggtagtggaggtatttgttctggaacaaaagttgggacattttgagtattagtcatatttgaagtaactatttgttgtgaagtagatgtcatggttggaatgatagtaggtacttgagtcatagtcgtcgatatagatgggactatagagatagggtcctgttgaggtaggacgggcatcgatgaagctgtgtataggtttggttgtaccgatggtgttggaagcacttgaattggttgttgtatcgtttgtggagttgattgcattacaaagggattatttgttatttgttgggggataaatgacatttgattttctgctgtcataaatggattatgcgattgtgaacctgtttgtggtggtaacaaaatgtgttgatttgctagttgttgctctaatagagctttctgttttctaatctcttctaatctctgttgagcaaaagttgatgccgatgaaagtgcaccactactagcgataccagttgggacagtggttgtggttgcagttgttgagtcttgattaaaagtgttgtgagttctattatcttctgctagatgatcttgtaaagatttgactaacttagttgtgatatgtttgatgattggaattctaagacccacattttttgctgttttcaagtatttgacaacaatatcagtaagagtcacgaatcttttatataactgtaaagtagtatctgcttctgaatgagataattcaaaaaacgattctaaaagagtaataattccttcatttaaggcattatataagggtaaaagatcatagactaataatttaaatgaatataaaaataattcatttgataattcataggaagtaaaccttactttaattaaagcttccacttgtaattccaacgagtcgacttgatccaatgcagattgtatagattcatggttgttgttatctatgacaattctcaaggttttataatcttctttaacaaaatctttttttgtctttgaaaattcttgagttcgaacttttaaataattcgaatacttctgcaataacttaacatcaccagaatgtgtgctctgtgacattaaattattgttaatatggaaaaattggtcagcatgataagattcagataaataatccaaagctacttgtttttcaccatctctgattagaagatgtaagataatcaaggctttataaacgaccgtccatgcagaatcgttgattctaggttgtaatgcatccataatttcttgaaaatcacctgactgagtagtacctaataggattgggtcgatgtacttgctctttggtggagccattttaatctttgtggcccccttaactagtttaacataagtagtcattttagaatggcaataattgaaagcaaacttgaaatatagacaaaggagatgttaatattaaataatcacaacagaagttggtgtttatcagtaataataactagaaggaataggagaaaagaaaagtaaaagataaataaataaatataagtgaaagtagatgtggaaagaaaaaaacaggctggtatcttaaggaaggaaggaaggatgtggttacggtgatatcatataggatatcactctaataacaataataaatgagctatgtctccttatacatatatatatctatatatatatatccttgtgttaacccaccaatagtttagtttagtttaatataggtgcttgttccacatgtacattaattgttggcttgaaaacaattactattcttctattgatgttaaatatttctgttatctaccgatttgaattttaaaaatacgaaatattattttgcacggcaatggcaaaaaaaatgaataagccctagctttattaattagggttctgtcgtgtcaaatcctttgggcagaaaattttggtgacaacacattttttttcataaagagagaggttattgtacaatatagaatgattccattggttatccagtatctagatatttaactgtagtatttgtggagttaatttgtacagttattttaggttcaataaaagtggttgttgttatttttgtttattctctattaaccaaaattttgtacattttctgttttaacttgtacatatatatatatatagtgggtatatagtatgggtatattttaaattagaagataatacataagcttttattctttcctttatgattatttttttttgactggagttgtggcattttcttcattaaaataataataataataatacaaatagataaatattgaagtattaaaataaatcacaactaattttaagaataattaaaataaatattatatattaatattcaaacataattatttttgagttaatattgttggaaacaaaaaaaaatttttagtaaattatttctcacttaataataaggtctcatagaatataaatgaaaccaaaaaggtatatggcagtttgttagctcctaataagttctgcaaagagaaaacaagaagaatatctattttgagtataaaaaataaaagatgataatatatggagttaacatttcattttcatttttcattttggtttttatatttattttttggatactttttgtaccattttattatttttatctcttggagaaagatatttttttttttttaaaaaagctgtaagcttagaaatatataattggtagactgacaatgagttatacatctttggaaaatagtcgcctaaaacaagatcaatgcacaatgttcttgaaaagtaatagattttatatctaattctgttatgacttaaatattaagtagctcagtattgaggagtagcgcctttagttattaaataaatagcatacattttcaatgttatattaatattgttggaatttggagccttctgcgtccatggtaatggtagacatcgttaagttatagatgcttttttattttatactaaatacatgtatatacttattatatagtgtatacagtataaattcttttatttactttgattcttcttttaaagtttttcctttctcttcaaatctctgaaaaatactgttggtgaaaaataaaatgtcttcctgatattatggtacatccgtgcaccacataatatacagaaaaattaattaaaaataattcttatggtaatgacagtaataaactcttattctccaatactaattaaaactatagatagttctagatccacttagaatcttatgtaatcttgatggtaatgagtttgttattccacggtaggcagcaagaatatgtagccatcttagtatagtggttagtacacatcgttgtggccgatgaaaccctggttcgattccaggaggtggcattttctttttgcagttctgtaatatccctgatattactgtttagggttttgtttagaaaaatgagggttgacgatatctttctaaactttcctttttggcaaaattttacaaacatacataaaaacaggagtaaccaacataagtacaagagtgcaaccaagaagaacaacaaccaagcaacgaataagaataagaaacagggaacaaaaaaagtattacataagtttagatatatagtatataaatgtatactattaggttatcttagattagggatatagatatatagatatataggaatattacatctagagatatagaaagagtctatatcttatatctatccaagtgaaatattattgagatttcaacaagattaactgttatcagaaacacataatcttagggttatcgcaagttctgttatcattatggagatagtagtaccacagtatatatcgcaacaaccatatgggcgagtctagtaatgttattgcatgaaagagagtgatatgtatgtagtttaatttggtattttatttttacaaacaaaataaaagataggaccataattacggggttgggttacacaaatcacgtgaaatcatgtgattaaagctctgaataaaatagaatacagaaaagagacatggctctattaacataaagaggtgtgataacatatatataggtaaatagatctgattggttatgttgctctttgaaatattcctacaatgtggagcgagaaaaaaagtagggttctgttagttaaccctaacggtgaaattagggttatattttttttcttttttttttgacttcggtataaaatgactcactttaacaggagagaaaaaaattttttttttattttggcgtgggctttgcctacaggaattgaatatgattcaaggtgacattaaatgattattttctatatacgaaaggagtttgttgttccaagcatttgcacaggtcatttcacccatctgcttatatatgcatattaatatcaattcttgcaaataccggttactgtctttgttttattattgaacgtaataattcaacaaaagtgaaagataacaaccatagataaataaataaataaacatttttgttctcccttccctaaccttctaactcagtttgtaattactatttaataatccatctgaaacggatacctacaaacgagttgattgtttacctgacagaacaaaagaaaagcaacaacagcaaagaatagaaaataaaaaagcctattatttacctatattcgtatcgctacttagcctagcatatacatacaaattcatgtcaagtgcttacgctttcaagagattctggtctagcccgactggtccaaagactgttcacttttgggctcccactttaaaatggggtcttgcattggctggtctctcagatataagtagaccagtggaaaatatatccggtgcacaaaacttgtctttaattgctacatccgcaatttggactcgttggtcttttgttattaaaccacagaattacttattggctgctgttaattctgctatcggtttgatttcttcttatcatttactaagaattgtcgattacagaatacggaatggtgataccgtttcacaagcaattaattacattatcaatggcccttctcaacgggaaaatcctttaaatgataataaacataccaatactatctgatatatatatatatatatatatgtatgtattaatgtatgtatgcttataagaatacataattattatcaatgttattattgttatttgcatggttgttctgttttcctttcttttttttcctttgctgtttttttagtgtagttctctaagttttatccaaataggccatcgattgcatcataattgatcttcttcgagaaacttgcacgttgcaacatagttttcacactgtctgctgccgtgaaatcacctttagcttctgctatacgtaatgcttcttgtaaactagtacggtctgtacccatcgtatctgatatacctaattgggccatcatattttggtctaggccttctgtctttattctctttcttctagatccgccacgtttacgtcttttattcgtagttgtattacctgctataaggtccgcttcttcttttagtctcttgttttcttgttccaataaatattcttcgtttatgcctatccatattctttcctttaatttagatgtttcttcatctaataaaacagattctatctcttcatcatccacatctgataaattctctggatcatcactaactttagttaaatattcctctgtctttggtaataaatgcaaattcttgggtctatagggatctttttctaatgaatagccatcaattgcatcttgaaacttgacttctcgaaaattacgacctttcttctttaacttttctctcctctttcttttctcttcgtccctatgtcttcttttctcttcttgctctcttttcctttgagctatcttctctttctttttttcatattcatcatttgacccctctgtcttgtcctcctcctcctcttcttcttcttccacactcttttcttcttccgattcactctcactttgatcaagagctcttcctatctcgtcttcgttttcactgttactctcaaaatcataactgtcatcatggatattatattctataatttcaataaattttttctttgttaatcttctacttcttcttaacggtacgggagatgaatcatttaccacattattttctatatagtcttcttcttttgattttttctttttcttccttctcctattactgatttcatttctttttggtttaattttttcagtatctttctttttctttttctttgtttcttcttcttcttctactactactactttagtactaatactatctgtatctttatctttatcctctgtctcatcgtcaggagtatttacattactattttgctttttttgttcttcttcattttcctcatcatcttctcttttatcatttaatttatttttgttttcatgtaagtctgtatcatcaataccattggacgccctcattctattaaaatctttttttctcttttcagagaaccttttcaagtaaaataatagttcctttgacgataattcttgtgcagataacagctggcataaaattggatttttatttaatgcttcctcactcgtctcattgacttcattacgtttgatttggtctttaatctttttttcttttttacgattcttaataaatgatggaggtcttgcatttggatcctttattatactatcattattatcaatattattgttatcgttttcactttctgtaacctctctgaattctttaacggataattttccagctcttgttgctttgaattcatttaatctttcttgtaaagtctcttcagctacgtgtgacactgccacaatttcagaatgggttcttcttaaattattcatacgacatgctaataaaacacatgcacctgcaatccctgcaggtctacgcccttcaaacatccattcatcagacattttttgtgctaatttgactgcatctttaactactttaatttttttatcaccgagatccaatttttcggcaaaatgctgtataaagatagacggatcagctaatggtaaattagtaatatgtagtcgtttaaccattttcaaaaaagtggcgcctattgagtacacactaacttgtaatcttgaagagaaatcaattaacatgtgatgtgttttttccttacggcatgccacataaagacaggatgctattatgttctgtgatcttctaccttgaacgaaattattggctagagccagcttataccattggaaagcagcatcagttatataatctggaatgtttagggcatgagatacggctcttaactttctccttgcattgttcaaagtggcttctcttgattccaaagcacttgaaccaccatgtgacataaaggaagcatgtgcttgaccggcaccgataaaagaaccttgtactatggcagcaccagatgaagtttcaccaaaagtgacctcagagacaattggattatcttcggagacgacaccacaatttttacagaccaaatcattgtttgcatttgaaagatctctttcgaattctgtacttttacagaccttacaaacaggcatattttatattattttgtgttattttatgtgatgttattgcttattaatagcaaattcagataaataaataggttgagagagaaacaaactaattcaatgattctaataatatttttcctttattttcttccgtggcactgccattcaatgatgtatgtgatatgatagtagaatacaattgatttaagatgatcttctaaaccttttaacaattactattaaaatgaaaaaaaaaggaaaaaaaaataaaaaaaatcaaatgttgaaaacgcgtaaacccacagaatttggaggaggaagcaaaaaaataaaacgtaatttaacaagaattccgtatcccgccgcatgcggaaacaacccgtgaataaccgtccagtgccccaacggattttacggcggtaatacaaatccttggcggattatgccacggaaaagtaacggaaatgcagcgaaacctggcaaaagtgggtgaggtttttcatttcatgttacacataatactattcctctcttattaagtagcagataagaagggcatttaattatgtccagtttcaaatgataatatatatatatatatgtatgtatgtatgtatgtattacattcttttatcatacataaagttctcctgtaatgacacatggataacatgacagatgtcgtgtatagtggtaccgttatcaatagctatgatcaataaaataaggttagtctgttttccaacgatttttcctacagaccaacctctacaatatttagggcattgaataaaaatagtatttttttccttttttttttttgtttttttgctcttttggtttttctgtatttggtcatattgtaatactgttgagatttcgaaaatactacaaatgagattattcattttatgcttaataagtatatcttaacatgattcttatttaaacctttgcatctttgcatggataagtgtatttgtttctctttgtgtctttgtgccttgcaccaatcatacacaatttagctgttctatatactaattgtcaaaaataaaaacaaaaacaaaagaagaaaaagtcaataaaataataatggtcaccgtttacgttcattcggaagctgataatttaccagaaaagttaggtcagtacatattaaatcaacaaaataagacattatctagatcgaacacttttaagattgctatcagtggtggttcattaattaatgtattgcgtctcggattaattgagaataaaaacatatcatcaaaaattaagtgggatcattgggaaatttattttgtcgacgaaagaatcgtcccattgaatcacccagatagtaactatggggcattcaaagttgctgtcttagataatttaacaaacagcaaattacccaaggttttcccaataaatgaatccttgattaataacaataacaaatcttcacatataaaaattgcagaagattacgaaaaacttttacctaaacaattagattctttattattgggctgtggtccagatggtcacacttgttctttattccctggtttgaaacacaaatatttattggaagaacaaactaaaagagtcatgtggtgccacgattctccaaaaccacctagtgatagaattacaattaccttacccgtcctaaatgattcagtagagattgcatttgtaactgaaggcgaatccaaacaatcaatcatgcatgaaatttttgacttaaaagatcttaatttaccaactgctttaattaacgccctgtatggtgataaagttacttggtttgtcaatgataaagccttcgccaaagttgaaaacaaagatatttaaaccaataaatgatttttctcataagaaatgtatattcatgtatatctatgtgtatatatttatgtatatttgatatttgtatttaaccagtgaaatcataaacatccaaagaatttgatggcaaccaataaatccacttgttatcttctaaaagtttcatgaatccagtaagttctttgatattttcaattgttctctttgatccaatgataatcagtttgcatttggctcttgtcattgcgacattaacacgtcttaattctttcaataatgcaccgccatgtaactctttattacatctaaccatagatattataacacatctcttatctctaccttgaaattgatcagctgtcaaaatctctaacccattaatctcatgctcttgtagttctctttttaataatcttaattgtgctctataaagtggcattatgccaatatcttcatatttaacttcgcaccttagcattccttctaaacataatttggtcagttcaacttctcctttatttgttatattatcaccatcatatgtttcaacgatagtagggatcttatcataatttaaaaatataactttttttgaaggtgtcaaaatatcagataaccagttattattattgatatcgatattattgctatcatctgatctcttatatctggataatatttttgttggatcactaatatctagactttgattataaacttcatcactgccacattttaacttaccattatagattaaataatttgataatttcacaatatcaccacacatcctatattgatatgttaactctactacggactcgggatgtcttttgcttaaaatcttaaataaggattcttctagtccattctccctagctatattatttttaactaatggcggcagttgaaaatgatctcctaccattataaacctgttaccatatcgtaatggacctaaagcaataggcaaagatacctgacttgcttcatcgagaatcacataatcaaaatcttttgttcttaaggaaaatagtaaatcatttatccctaaacacgttgttgctactactgatatattgttaattcggtcaatatattccttatacgttcgaatatcttcatagtttggcataaatttttgcgtcaatggattgactttgaatttggaacccaatctcacgatattaatatctgaatttaataattttaataaaatgttatctactgcagaatgagtatatgacgtcaataatatactcttaccattggtgaccaaaatttggattaattctgcaataacagttgtcttacctgttcctggcatacctaagattaatgaataattatcacaacgtaatgcttggtcaattgctttaacttgattttcattaaaaccatctaaacaagattcatcatacaccacatgaggatattgattactagaaacaaatgtaggcgctactttatcaattaaaatttttcgcataacttcatcaccaccatcagatcttttacttattttcgttttgccagttttctcatctacaagttgaattccaggtgttactggtggaagaaaaagatttaataaattgaatcttgatgtggagagatcttgttgaatgttattcttatcaattctataattgacataattttgactttgaatagcttgagatgtacttgtaacagggtgaagaacacttataactgactggttaatattttttgaattatctgtcatagtttgtttattagtaattaactgtcgtttagtcgatataactatttgagaagctgttatttcaataacatatccttgggcaagggcaaaatttccaacttcatcactaataaatacaggatcgttttgatatatttgagaatgtgataatggagggaatgcctcataatttggatttctcgaaaaagtatatatgtattggccttcaaaatttgaatctgatgagaaattagatatgactaaataagataatgtaatagcatcctctaattctctagctacagaatcttttagatataattgttggttctgcgatgttatgcttgattcttcctttgtaatcagatcattatatttcctaaaaaagtagcgattttcatgtaggttggctttaagatgtgcagttaattgtgaataatcttcaacaccaatatcgtctagtgtagtagaatcaccgagaagtgtgtgtaaaattaatgattctatcctatcaccgcatctttcacaaaaactacattcatttaatggtggaagatcaataattgtctcaccaggtttattgatttctgttagtctgtactgtaagaacatggcaattctattacgcagcattattatatgttttatagaatgcaatgcaaatgggaattcagtcatcgttgaatctctggtataatataaaagaaaaaaattaaatgcaatatcataacggtcgtgtaatagtaatgtatagattaggccttgagcctcgtgtgcaatacttcttaatttcccagttttcacttccaatggaactagaaaatttgaagtttcccttcgtgcaataacagttgcatcaagaaaacctttgaatccatagacaggtgaccaaatattctcttcaatatctataacatctaaaatagatagaggagttgttcttcgtgtacctgaaatactaacatagcatccaaaattacttttagtaacgaatttattaatgaacgtaagaatattgtttaaatgcgttttaattatttcttttctgacattatcgatggtttcgtcacatacaataatggcaaaagaatatatttctaataattcatccagtttttgttctatatactcatttgtcaatttcatattttctagtttgtattttaaacaactttgtagtatttcatggacaatatttccaattgtcataggtaagctaacttcacctcgagtatcttgaaaaagaagttgaataaaactacttctttggcattgaattgctgagccaattgtggttgctgataataacagatctggatgtagaatcaataaattgtcattaggtagctgtgtttgtggatctttggcatctgatagtagcctcttatttgcaaaatttttgccttcaatgatgtgaacaatgtcaccttctttaattttaaggtatacccatggtgaacgaagaatcacggtttcagtttttccagcaccgtcaatacctgttaatattttttgttctcctatgtttggaatattcatttgtcttattgatacaattactaatcgaacaacaccaggtttattatagcaccattttgcgcgttctatataattgatattgtcaatttccttttgtacattgtatttaatgaccatgggtttcttgttgtttttagtaagagtgttttttgcaattactgttgatgtgtctgatactgattttgatacgtcaaaataatccagcaaggaatcatctgaaggatcgcctgaaggatcgcctgacagtacattattggtagatttttcatttttcagtatattatcattattcatatttatttctgatgttattttatccttgttattctctcctacaccttgatgattctgaatatagattttttttgacatattttcactattaaaactacaattttgttctaatgaaggtttttttggtgataaattctgtgtaagcatttccataattaaatcatcatcttcatcactctcaagataagtgtcattatgtttactaggtatatcctttgagcctgtaggagatttaacggttgatcgaaaatttgtatttatatcgattttttcccctttagaaatctctgttaaagttaggtctcttgcattatactgttcccctataggcaatggagaagaaggaatatctttaaatttttgagatttcttaagactgcttcttaattttatagatatgtctcctttaatatcattcaaaatgtcatctatatccctaagtaacttggtgtttgtagtcattgtttcatatttatccatgttattcaaatcagtattactgtcacctgcgaacatttttagatttgttccatttatttgtctttctactgtatttactgattctatttctagtccattttttttatgtgcctcttgttgttgttctttgatattagcttgtttattatgttcagatatgttattaaagtcaagaataccttttaatcgattattgaatagaggagtggaggaagaggggtttcttagattattatctattctatcaatgtcatcagacatttctacagtgctagtagtcttatcaactggtaatttatcatcagggttgaattgccacacaacttcttcaggtggactcatctcgcctagtgattttctcaactttacagtctcatgatcaatcatcgcaacactatccttttttttactgatattatctgaatcatgtaaattcttgttttctaaatcctgtgaattattctttttgttaggttcatgtttaatattatttttctcctccattggtattttctttggtacagcagtattcctaatctgtgaaacggatatcgattttaacacaccatgactatcagatttctttccagatatattgtcaatcactgcaaacttatatcgttttgtacctttactagaagtgtttgttcttcttttattaactgttcctttactaatagattcaattgtggatggatcattaatgtttggatttaattctttcacaccatcatttgagatggatcctttgccacttttattggactctctagtcatggatcattaaaaaatcgatagacacttaatgtttttgtttgctctcagaattaagttattcactctgtagagatgactaagtgacaaattagtagctggtacttagtattagacagtcaatttaatacatagtgaagcaagaaataaaataggagcatttgtgtgtttgtgatatttgtttctttgaagtttctcaaaggcatgattttaaaaagaaaaatggcatctgtattttctgtttgtagtgtaaaattcaatgtgccacaaaataaaaaaagcgagagctaatgacaagagcatatcgataaaatatttggtatcttaggtaaatatatatatattctatgtattccaatatgtttgtttgcttatgtgtttgtttgtaacaatatacaaagaagaatgtgaaatggtaaacatttttttatatttagaagaagaagtgtagtgtaaagggtagcaaataaatatacaaagaaatctagaaaccaaagtaactacaaatggtattctatgcaacactcaaataaaatcttgatataaaaaatatgttattctatgacaaggagtttaccaatatggtaaaaaaaatatggtctattgatatattgttgtgtcagaatcatttatatcttaaaaatgcaagaattattattacaatgctcataaaattatgagtaggttcatgattaacaataatatcaataattgaaatagtaacacaattcgtggtaacaatataatgtaacattactcttgatattattttttagtagggattatgggtttataaggagtaaatgattgtgttttagactagatgaatgaaatgaaacaaacaaagaacattgaaagaaatgataacgttttttttaaaacattgtaagaataattgttagtaactaagctaatatacacagtaaaatttgaaataagaaaataaaataaaattgaaacatactttggtcattttgataaaactatcagatattaatacctcttgttgtgaagaatcctgttctggtgatacattaagtttatttctagaattatctttatttttggtggcatgtgttctatttaaattgtttttctctttacttcgtaacaattcaacataatccatgaatttatttacatcgcctaaaagtttttgtcttatttcctctatatgtaatgaactattttttttgacaaaactaatatttgataattttgtaagtctacctttgataactttttggaattttttttcttcattattatatgttagtgatgagactaatttagtaacatttgtgctggaagttaagtttttatctgtatttgtcaatgaaactttttttattgtatttgaatcgcttccagtttctattgcccgcgtaggaatggttggggtttttctagtttcctgttgtactggacccactgtagtactcattactggaatagatgcattgtcattatctgattcactatcagttaaagaaactttagatttggataaccaattttgttcattggagatattctgaatatggaattcattttctgtctgttttgatactaaatttgattgtgatggcacagttgtaatagttggggcaacaacattttgtaatttatttttttgcgactgttctttcactgaatggacggtctccaaaaacgatttgatcttgttcggtgcaccaggagatttgtatggacgttcggttggtatactattgggtaaataagtgttatcaggtaatttttttaataattgtgggggttctcgcaactccatctgatgaaaattcgttcgtagaaatttctcactcaaattagaaagttgatataacctttgagcgtcgtatcctaaccttagtaataaatatatacaatctgatactatgtcctgaatatttggctcattaagattagttttctttgctttctttatcctagctagaagttcatgtataaggctctgcgtttcattttctgtatgtgactttgtagaattgtctttcaacagtttcatggatgcttcttctcccttttagtattggaattacttcaaaacaatactataataattaatgtagacaaactttgggtagttagtgtgacctttgatcattaaatggaaataatttgtgttcaatacacacatcattatgtactcataactatgaatagtaatttttctttgtatctcttacacacaagtttaggatagttttttctatatgactgtctccagtttgtttaagcattatatcaaaataaaaataaaaataaaaataaaaataaaaataaaaataaaaataaaaataaaaaaaaacaaataaataaacaagcatataaataaactaaattaattaaattaaattaaattaaattaaattaaattaaataaactgcaatgattttatgtacaattttgtttgttataagatccccaaaatcttgtctattgaaaaaatatgaaatagatattagtatatacattaatatatgttgtaggtgatattatatgaattttggtgcatagcttagaattaagtataaaaatgagtgatatacttgtatatatgtgagtttgtacatgctaagattaactgggctctatttatatagtactgcactgtatttttatttcaccattgaacatttcttgaccttgttattttatgcaaacaaatcttcttgttctgcttcaagttcttcattacccgtcaattgattaaattgcaaaaagtgtactggacggtgcaactcattgtagaactcgatgggtatacccaattctaagttataatctagttctgcattaaatgcagcacccatcattgagtaattccacatatcttcagaggggatcatgaaattacccataatacgatctgataataacaactgtgcatgtacgctatatgttggttcaaaagttgaaggcatatcatcgataacttctttgttatttaaaccccaagctataccctcgtcacttaaagtataagcagaaacagatatggaacccggttgagaacatacagtgatattcactggatcacacttcatatgattttcaaacatattagcatgagtggaaacgtgataaggagacataaattttagtgacttgtcttgagtatgcatccaaccaagtaattctaatccttgcaaatttggatatattgtccgatctggtattttactcaattgtacatatttgtgcgtgcctaattgaggaactaacgcgaccgttcgaatttctttgatgttaaggtgatcttttggagatttaccgaataaataaacagcaatttgaattttaacatcagatatttcaataaatttttgtaaaatattctttggtaaaacataaatatttttctcttcgataaattcatctgatgagatgtaaatgtttttcaatcttaaatataatagactattagcaactgcattctctctccattcatttttagatgtgaatgtctggttttcataattagatgacgtaacaacaacaatttcttcaccttgcgcattaagtgtttttgttttcatagtagtagtagcatggcttgtttcttcaccacttcttctatcttcggctcttgctgctgctaactcagccattttctgtctctgaactgatggtgctttgatattttgaccaagaattaaatctttgatttctgtctgtgtcaatgcagcaatgttaacattatattttttaccatacgcttctagaattaagtcacgcatttctgtttcgatttgaatccattggtcactagtgaatgatggccacaaatgattaggcttgattacaatagtgggatcacgtaaaagaatcattttagccttttcctcatctgtttttaaagcacgaagtaataaaattaaacgtgaaaacgcggtgtaagacgacacacttttggtccaatcatcatatatattaaataacaccatctgaggttctgtagcttttaaaacaacatctgataatttatcaatcgagagtgcagcagagaatggtagtttcaattcggtaggcctaatagcaatgtttggaaaatcaagcatatgaacttctaatgggtctaacattgcttttcttgttgcaatgatctgttttggttgttcttctctgggtaaagatttaatcaacgcactaacttcttcagcagtcttccattttgcaagttgacttaaacgtttttgacccgaccacactgaagtatgaataatttttaaaaatagatgaccagttttaggattcaaaatgaaaacacaaccattgataggtttcgttgcaacattaccctcaaatgttctatggacagagacacggtatacattagtgtcatctacaaataacttaatatcattattgaataactccgcataattagaagaacttaaatatggttcttgaatattggattggtaaatttgtaaaccttttctaatacgttctcttagaacgtaaagtgcaggattagctttcataatagttttcataccattttgaatcagtggtttcaaaccactaaaccagttaccgtaagcatcatacatattgtatgctaaatcaatgccgatcattacacccgtaggagatggatacatacttacattatccgttgtataatctaaaaacttagcgcgaacataacgtgaaatatcgtgggaatcataatcaccatatcttaattgaacatcaaaccacattttgtttgtagtaaaggaagtaaatttatcattagttgtatgtagtaaagatggttttgaaacattccactgatgtaaacattctaaagttatatcggctgccgatgaattcatcttataagatttacgagggtgtatggtttccttattaactgattctatctgtaaaatatccatctcaccgtctagtatttgacatatatcaaacacgatactttcatgaatcttctgccataagtgagctctaaagatctgaattagggagatttttaatgtaggaattttaccgtgtaaaaatatacctgtaagatcaagttgaacaacaaaaccgacatacacatttgctctattaattgtaggagaccaccatagagtaaaacgacgattgggaatttgcgaaagacctgttctttgagcatgggttaattttttgaattgcatagaatcctcaaagcccgatgctttctcccagaataatccttcccacgatgtgaaacctgtacctttgaacaatgtgtgttctaaaatagtttctataccaccaagagcttggattacatccgtacggtatgcatttaaattccaaagtttaccatcatgatgagaatttgtccaccaaaatggactatttctttccaaactatattgtttaaaaactttacgaattctgtgaccacgatcataagctaaggtatgacgatctttttggaacaaagtactaatacgaggaatacctcggtcccatgatccttctagttcttcgaaacctaatctacgattttgttcaatcgcttcttctcttttagcagcatattcagcccatactttttgggagtccaaaaattcattttcccatgttgtaatatatctgaaaatagttggaatgactttttcatcttggtgtgtcataccggctctaaagtgagtgattccagtatctgtctgtttagaccatgttaaatcagatgttggaatcaatatatgtgatgcactaatcatacccaatccaccaagttctttaggagtgtagaataccgctggaggaaaacgcgtaggcatttttgaattaagacctagtttaaccctattctgtattcttgtttctgatttaaccagtatgtctagtaatgattcagttgcaataatagcctctctaaaatatgtaaaaagagatataactgctgtattccatttagatgcaatcttagtaaaagttgatgaacctgcagacattaatataccacgaattcttccttcaaaatgtttgacttgttcatcggaaactttcagaaatgcttttgcagtacgttgcttagtttcttcattaattagatcccatacaccttcagcattacttaaaacctcatcagatcttgattttggtaatatacgaacttcaaaaccacacatctcgaataataagttaggattatgtctactatatactgagacaaatgatttttcccagacaatatttgctaatgactgtggaacctttcctgtaacatcccaaaatattgctcttgcaagattgacatctgagcgcatcaatctcattctagtatctcttggccagcatcttttattattatatcctacggcattttcaaaatttggatcagggttttcagctaaataatcatctgtcaactcttcagcatcatcttcttcaaagtgatataatatatgtattttatccatatatcttgaataaagcctaataggatgatttaattctacttccttactcttaaattgcataaatgcattaggttgattaactgggccagcaaaatcagtcgctctgtcttgacctaaaattaacaagtcaattattaaaccataatactgataaacaaatgatgcaaactgaagaccttttattagcccatatttgttaacatgactcatatctttaaagttgataacaacattattttttgcagttatgtagtctgccaaattcggatccataattaaacgcagtagtctgttaagtacagtaaaatcaattttttcagctaattcttctaaagttgtctcaagtagaactgtactttcaccgttatcaatatcccaaataccagatacattgttgataccttgacaccatttataaactagtaatggtgggatttcttcatcactgggttttatccaatttgggaacaaattccttttatctgcttcgtaccacagatattgatctaaatatgcgtctgtaattttttctagggggtctacagtataaactggtgatacgtactgataatgttcggtcatagatatatcaaccggtttaaataccctttgtgataaaagatatttttttattctattcaatgtatcatgagggttatcatatgcctcttcaattaaagctaactcttctctctcaatagtattcaaacgaacctttgctgaataaacatcctttaagttttctagagcaagaactagaattttggtgtcgtttttataagttaatgggggaaatggaattggtgaaaactctctagattctagccagtctaccatggttgaaaatatactagaagcttgttctggagttatctcaggaccatttttttcaatctgttgctgtctctcttgttcgttttttagccataaacgagtcagtctccctagattttttttgacaacagtcttttcaatatgtgcaccttttttaattttttctctattgtaatgagtagatgagacccatccgtcagctttggctttaatataacgttcaataatatttttaataggtttaggcataccaggaacatcccatggaatgttagctttccagcaacgccatgcttcacttaggtgttgtaaaatagttctagctttgttttgtctgattccttctgggatcatatccaatatatcgttcattacagatgctctaagttccaaatcgtaatatgcatctgatctttgttttgttgtggatttaataacttcgttgctacgaccttcgaactgacgaattagtaagttatctagccaacgctccagcaaaggaatgatacctcttataaaaaatatccataccctccacgcaggttgccaaaatccacaacctggaccttttccaataatcttattaaatcggtaataaacaacatgtttaagatctttacatgcacgaatttggtgcataactttgtatttgtaacgatatacaccagtcaattgaccaacatgattcaaaatataatacaacccatcagctaattgatatgcatctatattgcccaaacgatattgaatatgggtgtcaactattaatttaatcatttttagtagttccctaattaaatgaaacgtattcccgaatctagatttctttctctccttagttgttaaagttttggtaggtttgagattgaaattataatccaaatgtaaataagttaaacctctcctatgtatcaaaagatttaacatattgtgtccttgtctacaaagttgcaaacctgcctctatccaatcaattgtagtttgttgaaaatactttgtctttcttaaactttttagtagaggagtatttttaacctgtgaccttcgtttatttattcttctttgtttcaactcattggagacatagttctttaataatttttgataggagacttttacttttagcgggtattcttcatctggatgttgtaaataccattgttttactaatgcaacatcttgtgctcttatagttttaccacttcttctattaaatgggaacgatgcgttgtataatgcaactgcatccttcaaattaggggtatttagtttcacattatccattaagggacgtatattcgacaggaatcctgtatccttttgtgctctttcctttgtatattttttaagatcatcatctatcaaaataggatgcaaggattcatcaaaataaaatgctggtaattctaattcatcatcattacgattcatgatacataataagggttcttgatatttttgtaattctacagatcttggacgtgaattataaatatgtgggaaggctattcgatattcacttcttatggggtttctgaaaattattctatcaattgcattaaactcattgtaatcttcttcttcctcatttggatataaaggttcaaatttaggtcccccaggtatactcgtattcagtgctttggatgttaaaaaggattccatattgaataagtaatctttatttgtatcatataattcatgtctgagaggtgttgataatctatataaatttgacataataggtaaatttaatttccattttttgtacgcactacctggtacatttttgggatggtctattaatggtttattgtcaaaaagccatgatttcacagctttatcatcagtatcatctaactccaatgaaatagcttctgggggttcaatatcttttatataatccgaataagacaaaggtaaatcgtcatcatcaaaaggtgggaatctcattcttttaaaatggggtctatcccttttttctcttctcatggcaatccacatagtagaccactgtgaagtatatacaggttcaattactcttggtgattcatttacaaatgtgatagcacccgatgtatggtataatactcgaacttcctttttctgttcccaaggttgtggcatagattctaaaagtttcagtatagcatgaggcatatactttaatgcatttagataagccctcttattgtaattgaatctttttgaagtcatatccatgtgagattcaataattttccttaagtgttcagcaggcatatcaactttatgtgaatggacaagaccagttttggaagatttcttgcggtgtttattagcattgagaaatttgttttttgcaagtttttgtcgtttgttttcattctcaacttgtttctgagatctcttagaagacttctttctaaacgctttttgattaggacgagattctgacagagtatgggtaatatcatctactatattatcagcaaaccctggaggcggtggtagagatggcgattccaaggaatttatttcttctagatctggtggtggaggtggtggtgatggagatagtagactctgtttttcctctatatcttcatcctcaaatcctggtggagggggtggtggtggaagtgaattagtattgttgttgaggacattgttttcatcctcccaatcactttcaaaatcacttaatcctggtggaggtggaggtggagttaaatcaggcatactaactctattgtagtgtaattattaaaaagaagaaataaagtaaattataatatagtatatttattcaataatttttcactaaaacggtaaggaaatcaaaactatgtatatcctgatcgaggatggttagatagtttttgttagaaaatgaaagaagaataacaaaaaattaaattttcaattcagaatattttacaaatagcgagtcttactagtagtctgcgttgttatgtatattgtcatagttgtgggttaagacacattttctattgatcatggctctatagaaaaattataaatggtatgcatatttcaactttttttatattttgacaaaatccgctagggtgattttagtaattgaaaagccgttgtttcttaatatgtcggaatgcattacggataaaaatttgagcagcggtttgtgtttgtagttaatgagtgagatatatatataatatcttgaagaatcaagtacactgatgctgatagatacttaattttatatttatacatacgtatgtttgtatgtgtttatatgctatataaggttgtgttaatgagaataatagtgcagtttttacgatgaagttgtttaaaaggaaaaacattattttaagataatacgacaatttctagctatatttcttgcctcttcaatctcttcggatgtaccattggttatattaacagcatgattgtacgcagtttcataatttttcattctcatttcatgctgtgccaaccataatcttgcctttattgtttcgtctgttactaattcaccggatgaattgtcctcaattgcaatacatttcaacatagtcatcttacaattatctatatccatcatttgttcatattgtttggctaatctgtacaaaagcaatgcatcttgaccaggattagaggatagttgatatgctctttgataacatttaatagcttgagttgcatcctttaatacggcataacaatcagctacggcttgccacattctacgatccagcggttttagtgtacaagctttttgaaaatagtacagagaatataggtgcatatccaatacttcgtatgcttgtcctaaaccataccatgccttgtaatctttttcattgatatctactgctctacggtaacattcaatagctgcatgtgagttttttaactcgacaaactcatggcccattaacgtccacgcactagttgacttcttgtttaataccagtgctcttctgaaatacatgatggatttttcgtgttcctgccttgcactgtaataatttgccactatgcaacatgtctctggtctaaatctatccaattgggaaacgaactgagccaaatacgtcaatttcgaatatttttgcatcacatatagtatattcgaataaatgtctagatcttctagtctataaggatcgtgtttcacaatatcgtcaaaaattatttctgcagtggcatagtccatataactataacttatcattgcattcatagattttaaaaatgagaaatttggcattattattaacaaatattccaagattctaaagaattcatcgatgttgttgctgttgttgttgctatcattagtattggcattaatactgatactgttctgattgttactattaatattattttttttgttcgattgcggtgtagtatggttgttgaaatttaaacttgttacattatcggttgtgtaagaattagatggtgtggataagtcaattgtggaactatggaattcttgatatatggctaatttgaaaaaatcaaccattatattggagtttattactaattgggacgttgtttcattgctctgtctaataacaaaattattctctatatagcttaaaagtaactgtgcttcatcaaatcttgatatacagtttaatagttctgaccaacaactccagttataattgtaatacgataaagaatttaagaaagcagttatagcgatagatttattaccttgtcgtgtaagtatcactccctttaaataatataataatgcaatccccaattttgttttgtctgatattacattatcgttatcacttaataatggtttaatgtgtgtatccatatactctcttaattcagataaaagaagagacagactcgtttgatggccagtctctgacaaaattgtgctagtagttaaagacttattattttgtgaattgttattaaacatttctaaaatttgcccatccattctatttaggtcaccatttgatggatcatgtttgcttagattgttgattattcttttatctaatcttcctgtcattaaaatgttctcggtagcttccatatatttcttatcccatattaagaaatctgtatagagtttcaagaattttaaccttggttctttaacatctttcaaatagaaggaacacctatcaaattctttacaatcaaatagggtggaggcaaagagataagtatcatattcttcttcagagagacccatcataggatcgatattcaatgaaccagtatttgatttagcagtagatttaaaaatattatcaggagagacttgcccatctgacgataatgagatatttaattttaaaggagaatcatccttggtcatgtgtggtattgacgaatggggatcaccataactagtattattgatattattggtattgttattattgttgttgttgttatcattttctgatgttttgatgataccattgagtgcttcagcagaccatttggaggaattatataacttccattgtgataaatctctgacagaacatctcagtttctgtttaatctctgttataaagtccattgttagtgattcactagcaagcatcacttatataatttcgtatgcttagttggttaaggaattcacttaagagacaaggtagggggggagggatagttgttacgtttatgtgtatagatacgtttaaatatatttatttatttatttacaaagttagatgtatcttgcagatacattgaatctgttgaagggtttatacaatgaataaagtaacaaaacttaagaagttaaatagaaaaacgcataaaaaaacaggaaatacaataggtcgagtcgatggatagatacccattgtaataaatattctgtatatatatgtatataggtatgtacaaattctgttatttgattaattgttagataagtgactaatagaaaggtactgagaaaagaactaagcattagtccttttctatgcagaaagttgtgtgtgatttcaggcatatattgcaaagaaacaggacgtgaagaaatgtcaggtatagaaaacggtgatgagtattttgattccttatgtgaattggataattattcccaagcaaattttgaaaagttacaggatgttttaaaaacattgttgaagctattaaaacttcaatcatctaccattgatacatcgattactacacgtaatgttgaaaatgaagatacaaccaatgcaattgatgataatattattattaaacttcttgatactctttctagagacttcgatttgttgattgagacatctatagctttaaaacaagctaaatatcaggctagagaagcccagattcagtgtgcagaagccatggagactgataatcatacaagactgaataagtctccatttggtaaggatcttacggaatgtgtggatgtcttagaatgtatccaaagagattcattgagatatactaatttaatagacaggatgtcagttgacctagtgaaacaggtagaagtttcagaccctaatgtatccagagtggacatggaaagttggaaaccatctaaagaattgcaagagatcttagatcaatattctaatacagatagagatttatctaagatagatgatgatttgaaagattatttggatcaaatcaagttatctagagctaaatatacgcttgagaataaatatcaattacaaacaaagttgaatgaattaaataatgaaattaatcaatggagaaaagaatgtaataacatggaatctttgatgtttggtgatgatccaagatccatgaaaagtatgttaaggacaattggatctttaaaacaaagattgattgatgagagagaacaggactgtggtacaaatagttcggttgacgatgctggtgagcaaagaaataaggaagaaactgtgtgatgagtagaagagcttccatcaacatgataagcagatataacgagcatatatgcagatacatatgtgatatgtgtgtatagatattggtgtaaactggtttagctatcacaaacgtatatatatgtatatgtaatgatgtaaatatatagcaacaaagtatttttttcactaaatatatatatatatatataaatttggttgttttagtgttatgtgtaaacttctcgaatataattttgcaacgtaatattgagggaatgtaaccgaataaaagaggcagtttttttttctaatgccatatgtacctaaatatataacatatacgtgtgtgtatatgcatgttggaaactaattaagagtaggtggagacgatatacaagtaggtgtcaaaagtatggtatcacactgtgtgggaagggtacaggcaaccagacatttagaaagatcagtatggtttggtcagtttcggtggattcacaggagtagaaacccaccagataatgcacccacattgaatgaaaatgacgaatggttaaatcgattgaatcagaatccctatagtaatgatgatacgattcaacttacttccactagaaatctgtttaaatcttataaacctgctaaaatgatcgattttgaaataatggaaaccaacggcagatatggcaataatattaagattactagtccattgttgaatttcagttcgatgaattatttgaagcaacttgatagacaacggaataaagaacaactgtatcgtcaagggaatttccaagataccaagataatttgctgtaagagtgggcatgggggagacggctgtgtttcattctttagggatgcgaatagaagaataggtccaccagatggtggagatgggggtcatggtggtagtatatatattcaagcagtgaaaggtttaaattcgttgaccaaattaaaaactcggtatgtggcacctgatggtcgatcaggacaagcgggtcaattggatggagcaaaagggaaagatatattgattaaagtacctgttggttccacaattcgttggtgtatagatcctaagttggtaagagatagaatttcccaacgtctaagttctcaattaaatgtttcagccttatcagtatcattgagaaatattttaaaggatgaagaagttacactggattgtataaagacagattcacaaatttccccgaatatcaagctttcaagagaatcttatattggacctgaaattaattctgttcctaaagatatttctccaaattggatctttaaagataaaacattagaataccatatggaaaaacattggtttgtagacttaaataataagatgaaacaatatgacagaaatttattatttgaagaaagaaagaacgatgtattcccattgtatggtattgatcttgatgtagacacaactggacctattagattattaaaaggtggacaaggtggtttgggtaatatgcattttctaacaagtatgattagaaacccacggtttgcaaagaagggtagacccgggctggaatgttggtttcttgtagagttgaagattattgcagatatcggattaattggatttcctaacgcagggaaatctacaattttgaatagattgtcgaatgccaaacctagaattgggcattgggaattcaccacattaactccgagtatcggtactgtatcatcaggaatcataggcgcagatgatacttttactgtagcagatatccctggaatagtcaaggatgcacacctagatcgtggaatgggattagattttttgaaacatatcgaaagatccacatgttggtgctttgttctaagtttagagagtaaggatcctttacaagattttatgatattaatagatgaagtcgggggtattgggggcgtcaagaagagggaagttcttgtggtggctaataaggcagatcttacagagtccgccgatactattgttagatatgacagactttctcagttctgtaatgaacataattgggatatccttcctattagtgcattgaagaatcataacatagatttgttagtacataaaatgagaaaatgcgttacaactatgtaaatactgtaaatagtaatataacattcattaagttttttttcatgttagtttgagactgggttattaattgtgagttcccagtaccacataatagtggtaataatagcaattgtgccagtggtggccacatcatcacattcttttgctttctctctctctttctctcttattgtatacgtgtttgaagttttttgtttcttttcatctttttggatgatgggaggaaaagttttacttggaagaaaacagaaaaaatgaagaaaaaaatttttctgctatgcgttatatacataatatatgactgtgttttgcgatgagcatcgaatctcattgatttagaagcaactacccgatacagtattctatccacagaattttcactttagtaagttgtcggcctgtgtaatattctataaactggcccgtttgtcactaacaatttatagttgaaacagtttctagcaggtaaggacaagaaccaaacaaacaacagatataaaataaaataaaataaaataaaataagcaggtcatggattttaatcaagtacactatcaacaacaacaacaggttcaacacaacggatccacagtgctatgttgcaactgtgggactccaatagatggttctagtggactggttatgtgttatgattgtattaaattgaccgttgatatcacagaggggattccaagagaggccaatatctccttttgtaggaattgtgaaagatttttacaacccccagggacttggattaaggctgagttagaatctagagaattattggccatctgtctgagaaggttgaaggggttgaataaggttaggttggtagatgcctctttcatttggacagaacctcattccagacgtattagagtcaaattgactgtacaaggagaagccatggctaatactattatacaacaaacatttgaggttgaatacattgttattgccatgcaatgtccagattgtgctaaatcctacactacacacacttggagagctactgttcaaatcagacaaaaagtcccacacaaaagaactttcttatacctagaacagttaatattaaaacataacgcacatgttgatactatttctatcactgaaacaaaggatgggttggatttcttctatgctcaaaagaatcatgctattaaaatgattgatttcttgaatacagtggttcctatcagatataagaagtctgaggaactgatctctcaagatactcatactggtgcgtcaacatataaattctcatattctgtagaaattattccgatctgtagagatgacttggtggtcttacccaaaaaattggctaaatcaatgggtaatatttcacaatttgtgttatgttccaaagtctccaatattgttcagtttattgattcatcaactttacaaacagcggatatgcctgctgatgtgtactggagaaacccatttaattcattagcggatgtttcccaattagtagaattcattgtcttggatgttgatccaactgctattgtgagaggtaaacgtgtcctagctgatattactgtggctagagcggcagatttaggtgtcaatgatcaagtctattatgttagatcccatttaggtgcaatttgtcatgctggtgattcagttatgggatattttgtaggtaactcgaattacaattcagaactgttcgatagtttaaatgttgattatattccagatgttgtattagtgaagaagaattaccgtagaaagaataagaagaacagaaagtggaagttaaagagaatggctagagaacacaaagatattgatgcatctgaagattacagttctagagcccaaagacaggaaatggaacgtgccgaaagagattatgaattattcttgcaagaattagaagaagacgaagaattgagaaagaacattaatctatacaagaataataatgctacagttgtaactaatactactgtggatcaatatggcaacccagttgctaaccaaggtggagaagaagatgatggtgatgatgatgcaccagaaattaatattgatgaattgttagatgaattagatgagatgacgttagaagatacaccaatggaaatataataaagttgaaggaagtactgtagtgaatacccgaaacacatcggtttaattttattttaaaagaattacaaggatatatatatatatatatataacttttcatcatcaagggatagatactagaatatacatacaagtgacctttgaacacatacataaatatttttgtaagacaatatctgtacattattttttcgttctcaaattaaactttatctctcttatttatctcttgtggtaaacatcagaaaagatccatcttattcctctgcttaagtgctggcgtttgtgtgtcttcttttaatgagtagttactttaactatgtataaaatacgggtttgataaatataagaaaaatataatatatttttagagtatatatttaatttgttgaggactgttaagaatgatacgagcatacattgtataattttgaaagtagaagaaacatctagatggttaagaaagtacgcattggtattattagatagtttattctggttcatattatattttattgctagtttcaattagttagtttgtttgtttgttcgtttgttcgtttgttcgtttgtccgtttgttaacacctatttaaatggatttgtctaaaaacaatacttcacgtttaaaatatgtgtttcctgtaaattcttttattgacaccagtttctatcaacggttatcagacttaaagttagatacattgaaattgagtgaatcgagtattcctgttaaatctatacttcacctagataatatacctaaacaaaattcagtaacacccctatttctaaatggacaaagttttgacgttaattcacaaagtaactatggtgctaatcaagatacattaattgagattggaggagaaattttaaattttaataaactagaacaaatgatgactttagataaacaacaatatctttacgaacaaggaatgaaactatgggaggattgtaaaaaaaacatccataaatgttttaaattttgtctaataagttttgcagatttgaagaagtatcagtatacttattggttaatgataccttccttcattctcaagggactcataatcactattgaaaaagatttattaaatagacaactcaatgatgttagagattggttttgtcaaactgtgaatagagataaatgggtgtgtgtaatgaataactcagtaattaaagattatgacccagaggagaatataagtttgaatggaaagattgttttcattagagatacgtcaaatattgataaaattccttcaagtgtcaccaaaaatatattaactacaatcaagtataataatcctaagattataaaacttaatgtttattttgttaggggttcagataaaaagagtttcggatatacattgaaatttgatgataataatacaccaaatttcgatgaatttctattaaatttttctggttgggaaagaaccacagagggtaaattattaccaagacaaattgatttatcttctttgattgacccattaaagatagcagaacaaagtctagatctgaatttaaggttaatgaaatggcgtattgtacctggcttaaatttggatattattaaagatacaaaagttcttctattaggtgcaggtacacttggatgttatgtagcaagaacattgttagggtggggtgtacgaagaataacgcttgttgataatggaacagtgtcccattcaaatcttgttaggcaaccattatttgagtttaatgattgtggtaagccaaaagcaaaagttgccgctgctgcgttaaaaagaatatttcctcttgtccaagccgaaggtataaatatatcaattccaatgattggtcatccgattactaatgaattaagagaacatagggaattagatatattaaatgaattgataaaagaccatgatgttatatatttgttaacagattctagagaatcgagatggttgcctactgtactttcaaatatagaaagtaaaatggttattaatgcagcattaggttttgatagctatttagttatgagacatgggatttatgataataatgataagaacgccaaattaaatggagaatcaactagacttggttgttatttttgtaatgacattgtggtgcctacagatagtatgagattaaaaacattagatcaaatgtgtacagtgactagacctggggttgctttactggcatcttcgcaagctgtagaattaatggtttcaatgttacaaagagataaagcacaagaatctaataaaggacaatgtatcttaggagagatacctcatcagattagagggtttcttgataaatttgagactttaaaagtcgaatcaccagcgtatacacattgttcagcatgtagtcacattattgtagagacctgtagaaataatgtatgggattttgtaaaaaattcattgaacgacaacgaatatattgaaagatgtagtggtcttttagaaataaagcaaaaaatggagagtattatggaggatattacgtggattagtgatgatgagctatgaaaaaagttcatttcattttatatacatatatatattcatagatagatcaaccgataaatatatagatatgaatagctacattttgcatatttatgcaattgagattttaatatgttgtttattttgagtagagtatttcctagtaactctattctttcaaaaatggtatgataaataaacttatttagctacaaaacataaaacagacgcagaagaaacagaacaaaaacaaacatttacggaaaaatgtacacttatcaaacacttaagactttaaagaataaattttaaatatcctttgatatacttataatttaaaaaaagtttaacaacaaaggaacaatatccaaatttgtcagccatttttattgaaattatcaaataaatactcatgaataattcaaaagataattaaaattggattaacaaatattataaaacatactattgataaaataaataaagataatatatgaagaaaagactacttgagttgaaacagaatattacataaaatgaaataactggaacaataaggtgtcaacagttctcaaccaatataatgttgaatacttgttgtttagataacaataaatgttgatgaaactctttggttaatcttttgctttttgtaggggaaaattattcatttcctgaataatcaaagttatgaacttgtatcaaattttttattttgtttacactttttataaattatttttagcaaataaagaaataaaatttacattttcactctaaacattctatgtaatttcattttatatttatatatatatatttatttttctattttatatacaagtgaacaaaatttttttcatcagtaggaaacacattagtatctttatcaattaattacattcactaacttcaacaatgccttaaacaaattctcttatgaacatcttttttatgttatcccatgaaaaaaacatcacatacactctttccatatactcaatatctttacaagaactaatattaataaaacagtaggttcctaatagtttgagtattcaataatattccttgtagtagcgctgtaacttctcatatgtttttatttttaacatgtttctttttatattctacaaataacaaaacctaaattctcaaagctcctcaacattctcgtatgccaattttttgctttgtaaaacaaaaaatccaaaattattgcggctgtttgacttttctacgcgttctgtttttgttttcatttccctcattttccaattcttggaaaaaaaaccaacaaataataaacacaaataataaacacaaataataaatattaataataaacacaaaggccatcgaacatcaatattctatatacaagcttccaaccagaatttttgtcacttttacactttaaaaaaatcataaagataccaataacctcaatactacaataaaagaaggatttaaataagaacaaaaagcactctaaaggagagaaactacttttttttttttttttgaaatatcacatatgtataatggaaataagaccagttgaagaccatgtggaattacttacggaatcatctacggtacaaaatgtagaactgaaggatgcattattatcaagacaagcaaattatgagccactatctaatattaaccccaaattgattttatatccactggataaactagctgaaatttctagtagtaatgatttaataagagttcaagagtcgttgatagtacatgatttgttagagaatttgatgggtcttagtggcacatatattagatataacaacgaatataatccatataatggtgatgtccctgaatttaaaatagctaaaaaattggatacttcattaaaagcattcagtaaaaaaattttacaatatggcagttattttgtagccttaaataatgcaagtgaacgttggacagatattaaatatggagtagtattacaaagtttaagctatgaaatcaaaaatttcattaatgagacttatttacctttgttagttaatagattggaaaaaatgtattttgaagatcctaatttttctataagagaattcaaacaaattctaaatgactcagaggtcggtaatcaactaactttgttatatgattttattacgaggattgaagaagagatgatcaaacgacaaaattctgatctacaacaattgtcaattgacaatttcttattggaaatggaacaatttaatcaaaacgatgatttaacaccactctttattgaaaggaaaatttcaccaatcgctaagggtggtgccatactgaaaatactttacagaatgatattggaattactaggtgattctaatagtgtactttttttacaaaatctattaattaagatcagtgatagttactataaaacgttacatggttggatgacacaaggtgaattaaatgattcatgtgatgagtttatgattatcgatactatgccctatataaacaatatcaatatgtcaaatcctattgagtgtgatagagtatggctaacacaatacggtattagaaaagatggactgttggacaaatttagtcttaccaatgaccataataataatagcagcagtagcaacaaactgttatttaagattctttccactggcaaatttttaaatgtgatcaaaaaaagtcttaatataaactacatacctattacacaagaacaagaagatgaaagaaatgtcaaagtatcaaattttatggaactaatggaaggaactaattttgagctttatgtggagaaatggtacaatagagccaatagattatgtttgaaattacttattgatgggtaccatttaccaaaaataatcgatgatttatctaaatggtattttggttacaagaatggatataatataaacatgatattaaagcagtcattagtggaactaacaaggcgatattctgagaaatatagtaacaatattgaaaatagaataaaaacaaaatttgaaaacattaagaatgagttattattgtcaaataatgttaataataataataatagtaataatagtaatactaatcatcatcatactcctacctctatagaatatgagaaagataatataatattaaaattattaacagtccaattagataaagaatcgttcgacgatattataaatcaatacattaatagtgaattacaaacaattggtaatgcaaacaaattaaatacattggattcaattagggatatggtaatgcaagaatttgagacttcattaaataataacaaaaagaacaacaatgacgaaatgatgaattcaagaaatgatggaactgagttctcgaaaatgaaccagacccagacccagaaccaaaatagaaatgaacaaaataatatttattatatgaaatttgatatcggtataccatatccattgaatatgataatcaatagatcatgtatattacaatatcaattaatcaataggtatttaaatatgttaaggtatcataacatgttacttgaagaaacatggatagagataaataagaatacaatttggaaatattctaattataataaggatattaagaataaaataatcaaaagaagtcgaatcttacataatgggatgaacaattttattaaatctataatggaatatttcaatgaagatgtcatcaagaatgagatgaataaaatagtacaatctttatcctcatccccatccttctcaccatcctcactgtttgataggattgatataaatgagttacagagtcaattggctgaatcattaactaatatattgcatgatggatgtctaattaaattaatcaaagtacagttacaaatatttgatatcattaataaattttgtaaatttttgttatcaatgaaggataagttgattcaattagattataatttatttacaagatatcaagaagaggagagagaagagggaaaagagatgagaaataggttaaattacaatgaagataccaatttagttaagcaatccgaatacatcgagtttatagaagtggtgtcaaaaagtttcaaagatcatagacaaacgttaatagaaggattatggtatcattatgagggtaagatgcatcctttgtttaattatcaccatggggtcacttcaacgaatgaatataacaataatattggagttatttctcatgggtctagattaattatgtccacagtcaatgtgggcaagcaagcagtaatgcaatgaatgcagtaagagccataagtaataaacagttggacatgtatatacctctatctacccaggcatacacacatacacatatacatacacatatacatatatatatatatatatatatgtatgtatgcaattcatgagcatcatattacagaataaaaatatcgaaatattaagatatttattagtaatagatattagtaatactttactaatgagctaagcaaaaggatacacaaatgaagaggacctttttttgtttcctttttctctctttcactttccatttaaagaaaaaaaaaaaacaagcctttgggcctccactaaaaaaacacccattcacccgcacaatgtgtagcttccagtaataaataacctctctcctttcctctttttcccttccccccccttaagggaatagcaatagcagtagcaacatgaaaaacggaaagcgaagaaagaaaaagaggaacccaactttgcgaaaaaactgtaacgccaaaaacccaaaagaaaagacaaaaagaagaagccacaaccaatcttgttctattgttgtgcgggaaggaaaactgaacaaaaaaaaaaaaatagaaaaagaaaaaaaaagaaacgaggatctcactttcccaaacgggtcaacgtgtctttttctctgagttgcctgccacttgtttccacttgtttccaccagattccataacttgtaacaaaaacttcacaccgtggaaaaatatacaatgaacgtcgttttcttcaaagtttgacatgagaggctatttttaataataattccatccaattcaattcaattcaaatcaaatggatccaattctataatcatcaattcaatcgattaaaaaaaatacatttgttggattttgtttatttttgttggttgtcaccaaatattacctttttggcctcaatctttgttttattacaattacaagttgcggttgtaatcatcatctgtattatttattattcttattattcttattattcttattatttttaattcatattattattattgactgtgatattttccctttgaattacttttttttgttttttgttttttttttttttttctttctcaattctcaattccctctactactactactggtatcatcaggatcatcatcatcattatcgttatcgtcgtcgttgtcgtcgttgtgttctttgttccaaatcatattgacagataataaatgtgtagattaatttaccaattaatcaattcacgaaaaaaaaaaaaaaataacttaaatatatatataacatatataaacgtcctatcctacttgataacttcaaattccaaaccggatttctaacgcctttcgtcttccctcttctttcctttttagcctctccttttatcattcgagaagaaaaccaagcatctttatatcataaatttgcgcatataatcaacaccaatccacaggttttaattcttaaaaaatggctatttctaaggtttacgctagatccgtctacgactctcgtggtaacccaaccgtcgaagtcgaagtcaccactgaaaagggtgttttcagagctattgtcccatctggtgcttccactggtgtccacgaagctttagaaatgagagatggtgacaaatccaagtggttaggtaagggtgttttacacgctgttgctaacgtcaacaacgtcattgccccagctttagtcaaggctaacattgacgtcaaagaccaacaagctcttgatgacttcttaaagaacttagacggtactccaaacaagtctaagttaggtgctaacgctattttaggtgtctctttagctgttgccagagctgctgctgctgaaaagaacgttccattataccaacacttagctgaaatctctggtgctaagacctctccatacgtcttaccagttccattcttaaacgtcttgaacggtggttctcacgctggtggtgctttagctttacaagaattcatgattgctccaactggtgctaagaccttctctgaagctttaagaatgggttctgaagtttaccacaacttaaagtccttaaccaagaagagatacggtgcttctgctggtaacgtcggtgacgaaggtggtgttgctccaaacattcaaactgctgaagaagctttagacttaattgtcgacgctatcaaggctgctggtcacgaaggtaaggttcaaatcggtttggactgtgcttcctctgaattcttcaaggacggtaagtacgacttagacttcaagaacccagaatctgacccatctaagtggttatctggtccagaattagctgacttataccacaacttaatgaagaaatacccaattgtctccattgaagacccattcgctgaagatgactgggaagcttggtctcacttcttcaagactgctggtatccaaatcgttgctgatgacttaactgtcaccaacccagctagaattgctactgctatcgaaaagaaggctgctaacgctttattattaaaggtcaaccaaatcggtaccttatccgaatccatcaaggctgctaacgactccttcgctgccggctggggtgttatggtctctcacagatctggtgaaactgaagatgtcttcattgctgacttagtcgtcggtttaagaactggtcaaatcaagactggtgctccagctagatctgaaagattagccaaattgaaccaaatcttaagaatcgaagaagaattaggtgacaaggctgtttacgctggtgctaacttccaccacggtaacaagttataagttactcaataatgaataataacaataattttttttgtttaattcttgttttttcatgcttttcatctatttttttttttcaacaacccctcatttgatatattgatgccaaccatttactgatgttcgatgattgattacattatatattgctgttacgtgttataaatttttttttatgtatattgtacataataaatttttatataagttttaaatttttgataaattttataactgcaaggcattcttatatctcttcccctcctgtttttgtctgtttggtatttttgcacccttattttttgttgtaattgaagagttatgacgctgcatacatatatatatgtatatatgtgtatatgtatattgatatagataacctggagactatgtaagtgtaattatcttttgggggatatctggataaatgctgtatatatccatcactacaaacgcatgaaacagctaagtaacattaagtcattatagtcagagcatgaatcatcatacagatatggatatggacacttgttcaatgaacatgtcctttacttggtcctacaacaacacatgcatcattttttcctggtggaaaatcaatacaggttctgatttgttgctaagctgtatgacattggttgtcttatcaattctttatgaatggttcaaatacagattacagttgtacaacagccatcaagtattgtcactccccttgaatagcaatacttatccaagtagtgttgttggaccaaataaaaggatgatcagtagctgtctatatgggtgtcaagttgggttctccttcttattaatgttggtgtttatgacctatagtgggtggcttatgctgagtgttttaattggagccacaattggtcattactggtttggctatagactacattatatgaaacagcaacaacaacatcagcaacaagcatcatctcttctagaaacagaaaattcactggcatgccattaatatatttataagacatgaattataatcacaaccacaatactggggaactgggcaactgataatagtaaaaaaaatatataggttattacattattttcttttttcccatctctttccttcttatattttttttctttattatttatgtaatataactaatatgtttatattatttgttgtggattaacttccatcacttctatgtaaatgcatattctgatttccacttcacacaagccattaataataagtcgcttgaaaaattgccttcatcttcaacaaaagttaaaagtgttattatatcatctcttctacatgtagttatagtacacacacagataaatctagaaatttgcgttattacatttccctttttattattattattgttacgactagacactatttattattatacctatctgaatccacacccacacacagttatctccacagttgtatatatacctatttatatttatttatccacaatattcatcttttgcacacagaaaaaataaaaaaacgatagggatagaaaaaaggaccccccccttccaagaaaaacgaactaacaaatcagtcaaccacctagcaagtaatgataataccatcatcactatttacctgttatattctatgtccacaaatttactaaaattgggtattctttaaggttggacaaatatgcaattttgccgctattaaagttctttccatcacgtattctcacaacttagccttatttggcctgcctgccatccaacaaccataacaatctcaacataagagaagtaatcatttctgataggaaatgggcagacgttaatacgtggttggtcagaaatttgtatactattaaaagtcaattttcatgcttttgaagtaacaaggcaattcattctaaaaataactcaaacagataacccacaaatgatatgatcattattgttataggatacagtagcttttggtcaagagatcatgaatcaaacatcttctgttataaaacatgtttatccctgtatctttgataaaacaatccataaagatataactcttaaatccaagcgacacaggaaaaatttttaacattttattgaatcatgtcttttaaaataaacactaaatctttaaactttttttttgatccttacaaatatcattccattccttctatttggataagaaaaaaatataaaggacttacaattcaattgtgttgaattaaaagtaatgacaaagtatacaaattacataaaatagccattttctatagagatcataaagaatcattaccatttttttaacataaggaacacgataacatcaatacacttattgaattgcatataaggataaataatctactatgaatcagcaccaacataaaattcacaacattgaacacactcattcttatgctttattcatattttcattttcatttatattttttttttccctgtccttttaccttcattaattttacaaaaaaactgtttttttctattttggaataaagaaagaatgcaaaaaaaagttttggagattcaaaaagacatcgaaagtcattacaatacaataaagaaagtgataaagctgccaaaaaaaaaaaaacaaaagagccattgccaagtagaaatacaactagggcaacggtatattaaaaataaaacgagagtaaaaaggtatgatataataagagttattgccgattgctatttaaatttttacattactacagatatcattttatatcctctcccaagactatattcaaatcaactctatattttatattcctcttctgttttaacggaagaaaaacacaactaaaaagaatcatggaagagaatacacctgtcatctctgagaagcaagagtattcctgtgctcgttgtcgtcgtttgaaaaaaaaatgtaccaaagaatctcctgcttgttcactttgttctagacttcatgtaccatgtacctatcccggtagagcacctaggagaaccaaaaaggagctggaagaagcaatgagaagaggtgaatatgttccctcaagacgtcgcaaaaaaacatcaaaggagaacactccaactactataataccctcaacacaagaagtattgcccaagatagacccatcatcctcacagtacaatatcccattaatgactaaaccaaatcaaacatcaattgtaaataacaaccttgtaagagaaaacagtaatgtatctttaccctccgttactgcattgtataatgatgtttattcaaatattgtgagaacccttaatcataataatacgaatcagacagacaatttaccattatctacaacaaataccataggtactacaccaccagtaacaaatcaacctacgaatgattcaccactatatgaaaatgtatccaccctaatctcctctttgaattcgccagtgaatacaaccactaataattccacaacagctcttattgctgaaaacatggctgtaagagcagatgataacaaaaataacagtattatcggtaatgataataccattcatagaactctgcccatcaaccctgcatctgcaattgacgtatcgactatggataaaattgacccggctcctttattatctgcaactcttttatctcaacaaccacaaaatctactgactacattaaatggaaggcagactaatatgacaaatattccaagagtctcttcgttaccatcaatgccaataggacctacattatccactccatcttcgatgaattttggtgtcaataataataacaataataatagtaatatagataacattgatagatacacatcagatcctaatttccaacagaataaaagaacaaagtattctttaacatcattagaaagtataagattatctcctataacaacagttcaacctatatccaataacaatattaataatagccattcaattacaccgctttctccatcaagtgtgaataacagtaacaataacaacagtgctactaatactggaccaacacaaataagtaccactgtaaccacgcctgataccaagtatattaatgaaaatagttataatcacgttaatatgaacaacagtactaaagaaggagaaaaagaagggggagaagaagtacatgaaccaatgaaaaataccactccatataatatagccaacgttgaatccatccctattgattctgcatctatcgagactgctacattgggtacaatctttaaaggaggacgtgtagggacatgggttaatgaagatggtagtcaaaagcctattgatagaaatcttttagataagtcgattgcagcgtactttagacacaatcatagattatatccaatgatcgataaagcctcatttttaaagcaagtagcaatgattgaagagtttgattatgataaattagataagatacacgattcggtcttcatttttaggctttatatggtgatggctattggatgcacgactcttagaagagcaggaatgctgttagaagatgaagaagaattgagcgatcatttagcatttttggcgatgaagaagttttgtcatgtgataagtttacaaaacatagagactgtgtgttgtttattgttactgggtatttattcattttttgaacccaagggttggtcttcatggactatcagtggtataataatgaggctgactattgaattaggattgaatcgagacttagtcaaagagaaaatgaaacatatgacgatatttgaagttgaagcaaggtatcgcgtcttttggagtgcatattgttttgaaagattgattgctacatgtttaggcagagcctctgcgataagtgacgatgacgttactgtgccgttgccacgttcgttgaatgaatctgagaaagaggacattgatatcacaaacacgatgatacgtcttagaagattagcgggtagaatctataaagaggtacattcgacgagtgtgtctaagaagaaattgacggtggaggaaagaattgagataataaacggattacgaaaagaattggatacgatatttgagacggagaaactgaagatgaaaaaacataatgataagaatatcaacaaacagataacaaacacgatatcgttccacagttcggacatatggttagcgatgagacattcgcagttgatgatattattgtacagaccatccagtctaatccctaaaccacctattgaatcgctctccatattgggcaaatactgtttaaaagcgtggaaacatacgtatacattgtaccaaaagaagttgttacctttgaattggataacgttgtttaggacgttaacgatatgtaatattattttgtattgtttgtgccaatggaccatagatttaattgagagtaagatagagatacgacaatgtgcagagattttggaccattttggatccaagtggatatttgcgaaaaaatgtgcaaaagtgtttacaaatattagcaatactatattggagataagtttgagtgacggtaaagtgccaaacatggataagttgactacggaagtgtttggagctaatgacgcatatcatgagattctaaatgaaaataatgttgacgtatcatggattgataagctggtgtgaaaacaataaagaaaaaaacaagataaaataaaataaatatagtatacaaatttattctcatatagatatgtgtatataatagatatatttgatttatcttcttaaaatagaggaaagaaagatgcgaaaaaaagggaaaaaacaaaaaaccctatatttctgcagataaatttactgaaaaagagacaaatgtcccacaggcaaccctaacaaagaatccagagtccagaaaaacggccccaagatcaccgaaaccctatttatctgtatttatgatctttcttctttccctttccctttcccaatctcacggaaaacgggaagaagagaaaaagaaaacaaacgaaaactttcatcttcgcagggcttctcgatataattcgtttacagaacaacattaaccactgccggctttaattttgcctccctctcccttcaaaagaaaaaggaaggaaaaacaaaaacaacacatcactttttttttcccccttttttttttgttttgctggtgccttccgatttcgggaaaaaaagtttcagggtaaatgagatcacaaataaaataaaaaacgaaaaagaaaaagaaaaagaaaagaaaagaaaagaaaagaaaagaaaagaaaagaaagatatgaataattacatagttttcttttctttttatcttgacaaatttatgcaaaaaaaaaaaaattcgttttggttttgaaaaatgccacagaattcgtattaaattatgatgaaaacagtaacaacaacaataacaacaatgatactaatgtgatgtttgtattgtgcgtgttttggtcagcaatctagctatttatccatctataatatatacagatatatctatatctatatctacatctacatctatatctacatctatatatacacattttgtattcgttccccagtttgtttgtctgattgtttgtgtgcactatactatactatactatgcattaattgatcgatctctttctcccttcctccctccctctctctctctctctctcgttctctttccttttttcttgtgtttgctatgatctactgaagttccaattgtccttctgttaatgtatataacctcttctcttaaccttttcttttcgtttctttctttgccttgttccctttcactagtttcttcttgttttgcttttgacataatttgatttgacttgttatcaaagaagaagaagaagaagaagaagaaaataaaaatatcaatcacacagtaactaaatacccaacttcttcagtctactgcatcaactataacactcgtaactgtgtccttctctgcatataaaccatgtccttcgtcaaagatttcaccccaatcgccttaaaggataccaacttattcaagccaatccaaatcggtgacgttgaattgaaacaccgtgccgttatgcctccattaaccagaatgagggctcatcacccaggtaacatcccaaacaaagactgggccgttgaatactacgaccaaagatctaaatacccaggtactttgatcatcaccgaaggtgcctttatctcccctcaggccggtggttacgataacgctccaggtatctggtcccaggaacaagtcgtggaatggactaaaatcttcaagaaaattcacgaaaacaactcctacgtctacgtccaattgtggaacttgggtagacaatccttcgcagacaccttggccagagacggtctacgttacgattccgcctccgataacgtctacatgagcgaggaacaaaaggaaagagccttgaaagctaacaatccacaacacggtatcaccagggaagaaatcaaacaatacatcaaggaatacgtccaagccgctaagaactctattgctgccggtgccgatggtgttgaaatccactccgccaacggttacctattaaaccaattcctagacccaatctccaacaaaagaactgacgaatacggtggctccatcgaaaacagatctcgtttcgtgttggaagtcgtcgacgctgtcgtcgaagctatcggccacaagaaagtcggtatcagattctctccatatggtgtcttcggtactatgtccggtggtgctgagccattgattgtcgcccaatatgcacacgttattggtgaattggaaaagagagctagacaaggtaagagattggcctttgtccatttagtcgaaccacgtgtcaccgacccattcttagtcgaaggtgaaggtgaatacgaccaaggtaccaacgacttcgtttactccatctggaagggtccaattatcagagccggtaacttggctctacacccagaagtcgttaaggaaatggttaaggatgacagaactttgattggttatggtagattctggatctccaacccagatatcgttgaaagattagaaaagggtttaccattaaacaaatatgacagagataccttctacgctatgactgataagggttacttagactacccaacctatgacgaagctgttaaattaggttattgattcaatggaattcttttcaaaaattttttttcctcatatgatgtcctgtttttcttatttactttatatatatatatatattagttaaatagatacgaatgaattattatttaatgttataaatatttggttagaatatgttcttatttatttatttatctgcttgattaacattcgcttactttttttttatatatagtagttttctgttcaaagaacgttataacgtcttataaatcatattcaaaacaatcgtatataataccaataggtacatatatctatttatatttatatttataaagtcgaaaagaagaaaaaggaaaaaagacaaaaaaatgtgtatgtatgtgtgtattttagataaacatcaaatagagattatagtattaaacttcagctactcatctatacctattttgtaaaatattcacttgctgttgtaatgcttgataattacctagaatgtttgtatcactggaagatgcatttgaaagcaaattattcggttgtccagtaacagttggactatgtgagttacttttactaaacatacccaattgatttggcatccctaaatattggccttgattcgtattctgttgactcatagtcatggttggtacagatgtctgtaatgtgttccctagatatgtgttatggggatttgattgttgtattgtatttgccatatgtatctgattttgttgaggaacgggattccccagatattgcacacctggtttctgctgctgtacttgttgttgtgatgactgggattggctattatacgatacttgagaattagtactataattgccagaattttgaatcggttgtgtagggttatgtaattggtatggaaattgtccattagtattgctgttattactgtggaaaaattgtcgagaggcaatattttgagaattattatatgtattctgttgtgaaatatgagagggtgtcgtagttgcagatgtcatagagtgttgttgttgttgtagttgagatacattactttggtatggtaatgcactattacttacattaggagaaggggtgtgcgataataatgactgaaaatagttgcctgccacattcgaagctgataacaagttattattccgaattgagccttgcgttactatattagttggctgcaattgttgctgttgagctgtatgttgaggacttaaataagttgagtttgccttttctgttatcgaataattagattgtcgtgttaatatattagttgcatcattcatcgtatgttgtggtgaagagggctgattagattgtagtatatcataactattatccccatacatactttgctgtgttacaggatgagttggggtctgtcgttgttgttgttgtgacgattgtatattttgtgggtgttcctgcatttctggtctatactgagtaaaattcataaatgaatcctgagatgtagtgttagattcattcgataacatatctatttgattaattgtattattctgttttttcattaaataattagcggagcctgtggctgtcggtttcaacggttcaattatttgaggtaccttagtattcacagtatttgctatattgttatattgatatgatgtagaagattgagtagcattgtcatttgtcattaaatcattaaaattactattactatttgtaacactagcattagtaatcgtatttgcattgatattaccactatattgacttcttactagataattagcagagccagttgctgtgggctttaaaggttctatagtttgttgagaattggaatcctgtgtcccaaaattagtgttatattcttgacgcatgaaatggttagcagaacccgtacttgttggtttcaaaggttgtagtggtacttgctgagcactaattcccacaaatccgtttgcacctaaatacgaaggtggaatcaaagaaacagaatcaggacctctaatttgtttgaaatgtgataaggaatcttgcatatcctttaattcttctttttcctcttcagtttcttgttgttcagtggggatttcagatatcaacgatgtattacgtttctttctttcggccattagttttagaagttgatccatcggtaatgataaatctaatggactatcttcagaaagattactatcatcagtttttttgtcatttatacttgaatcattagtattttcttgagagggctcttggaaagttatatgttctgagaatctgacttttttatttctataagctgagtttttaatctttcttctgatcctctttctagttgatttacctgttagtaacagagaggtaaaggaatcaaaatcaaccttagaatcattttctctattttgattattttcttcttcttcttccacttcttcataaacttctccatctgtttgagaatttaaaataggtttgggtttaggtactgtagctttttccagaatcatttttctagtaggtaaaatggatctatatacagccaaagaaattaatcttagaactgcaaaaaattgaccaatatttaatgcatttttacaagttctaaaaatggtgtatattctttcttttaacttttctggaatagcaaaattggttaagaatttgaaaatatcatttaatctaactaattttccatgtgttcttgttgtaatgtatttgtaccatcttaaatatgtacgcatttcttcgtgcgacagttggacttgagacaatgataaaggaacttgtaaatcctcagtcgtttctatataggattcttcactatcatcattgccaccattggatgggataattgcagttgatcggttactgtggctaccactatttatatttgttgccggatgattagccttccgtagtaaatgttgatttaaagggattgatgtgtttgaagttgttgtggtgtcttgtgtataattagcaaaaggattatttttttttggcataaccgttgtggattgttgctgtgtttgttctcgttgggcattattacttaaaggttgattgtaataaaatgatacagatggtggtggtgccccatccttttggatgtttggagtacttgaattatcgttaaaatttaaacctggtacgttcaaccagtcaaatgacattctcaaatataagatgattataataaatttaaaactagaaggaacgagtgggatgttataactgtaagacagtatctggcaaatggtttgaaatagttaattgaggatgtattgttaaaataaaagtaaagatcagatagttaataaaaggataaagtaatatcaaattccaaaaatatacaatgttaataatgtcttctgtacataagaactgttttgtggaagttagtgctactgatttttcttttctcttgttttttgtatgagttagcgcacttttttttggatttggttttgattcttttaaaccttctttatgccgcagttcaccaattactcgctacaattgcaacaatacggttttctgttgataaatactataaagacacaaccacgcaccacatacacaaaattggtaagaacagttagaaaatttatctgaagtatttatctggagtgtgacagatgatatagatacacatactcttttttggtggtaggaatgacgaagtttgggattcaatttacattaattacgaaaaggtgtcatttgaaaatacatttagaatattagttattaatagtatatagagcacgcatatgtttgtatatatatttatatgttttcgtattaagtgttcttcagtctataatagtttttatagtattttgtccttgatttgctggcaaagtaaaaaaaatgttgattatgtatagtcaattgcagttgtcattttactcaactcattcaatcaacctgtcagtctatctaaattatttgatttgtttttataatgaaaggagtattatgactactgatttataatacgttgatgcaagtcaacataatatgtagaaggctgtgtgggtgtattgttaattgaatagttccttttgttacaactttttatgtgatcaaacccctttatgctgatttctttacgtatattagtaatacttgaatctattttttgggctatactatgttgttttacgaaatcctcagatgaaggaatcccatcaggtaacataataggtaatttttgttttttgcccgattgaatatcttttaaataatcctttaaactgtattctttacattccttgttcctagaaaactgtctttcagtagtctttttaatatattcattttccaatttattaatttgttttgaatcacgctggagttgcatttttaagaaatattccaagaaatctttagaatacgccctattatattgagcaaaaacaggttcccttggagtgaaatcaaaacctgaaacatcaataagtttattctcatcagacgttaacagttgggcctctggtttgtctaggagttgcaaaatatttaaggattcgcctggtgggattgccattggattagatggtgtaatacaatccatatcaacttccttccttaatactttatcaatatcgatggcagaaaagaatgcacaattttgtggcaaatcattgattcccatctgttcacaaaacatggctcttgtccaaatattactgacttgtaaggccatagctaccctgtatttatccttctcggatgccaagtatctaatttcatcatggatggtgatacataatcttgcattaaggttatacttggcaatcagataattcattgaacataataaaagatgtaaatagtcaacgcctgatgattgaatagcccagttgattcgtgatgggagaaatgaggacgtttgtaagtttttttttaataaggtggaagtgataccacaacctagtgtaggtgtcatagggttttcttgttctgcgatggcttccaatttattgaaaaggattgattcagaacctccataccaatatttcttaaacattttggatcttttaatcttaccctttgtgttttcatataatttgagtgcggtttgtttggcctcattttccgtgagagcgggattaaattgtcttaataattcacctgcaaatttcacgccagctccatagattctaccataattgaatatttttgcttcattacgtgaacatccaagaagagaggcagttttactatgtaagtcggtaccttcagctttagtaccctctagacacatccacccaataggagtgcctccatgaatattaaacaccgagtcgccgactaaagacgctatccataactcctcgctatccacatctgcaccaacaaaacaataaccatccggtgcaattacttgagtctttaattctgatccgattctattctttttagcattagatgcagttaaccaagttttctctacagcccttcttgttacagtacccattggagccaattgtggtaatataacagctaaattattattattattgatattgttattaatatttgtattattgttattgtgattcttagagtcttggaaattaaattgattatcaaaatcttttttacagacaacgtgttgatcaaagattctctctcttgatgacatccaataagaacctgaagaattcaaattcagtgcctctaaggccaatttggatttagaggtcaagatacctttctcaaaaaaatgaatataacctttccctagtaaagttgtggatcgaagatttctgtctctgggattaggtattttcattagtatcgtaatatcgttgctgtaatcattattgctgttattaatgttattattgttattatttaaacttgacatcctttggttctgatatagtttctgtgattgttcatctgccattacataatttttttgaacaaatctatcgtatagatagtttggtatagggaaacaccaacctgaaccagtagtccatatcactgggaacccctcccatgacaatttaaataggatagggatgattcttgtctttattgtgatgttgggcacagtagtagtattgttatggaataatgatctgtaccattcaggataccctggctttttttggttcttataaggcacacccctttttgtcaatttggttggttttattgtccaatccaattgagaaagccaagggtcgttttggatagtttctatgaattgttggtcgggtaagtctttcagcttaactatatcttcgatgatttggatgattttttgctcgatctctatctttgatttttggtatagtgtctctgcagagttagtataactctgccatctggtgtggtccaatggcaagatacagttgttcaagtcctttagagcaccaaaggagactgggtgaggacatttctctaaaaacatggggaagaccgcatcgaacactttggatgtggcgatgacgtcggttgcacagtaagtcatgagttcttggaaattttcggttatcgaagatttatcagttgtggaaaaatagtctctgtttgtcttatccatttcaatgttacaatagtggtatgctacgtcacttaacgagtttaaactggaaacgctgatccatgggttgtcttccaattcatacatcaaactttgttccaaatcagtataagaagaagaggaagaggaagaagaaagtgagtctcttaattttagatttcttttcaactttttcaatttttcattttttttataaataggtctttgtcttgaacttaacccagtgatggcaatatgtagggatcttgtatccatataataagctcttggagcagtgaagttatattcttccaagactttggatctatcgaaggcgacgttatgtccaataatgagcatgtctctattcattgagtttaaagggatcaaatgtttataggaaaaggaagaatcagaagaacatagataaggcgaacaccaggagtaccatgctttggaagatacggcagtagccattatagggtagtgagacacattatacatggtttctgtgtcaaaaaccaaggtattttccagtgggtaaggaacagactggatagaatcactgggatctattgggtacctggtccaaccaggttgaaagagccattttgcagggattgggggtaaggatttgaatttatttagagccattgataggtatggatgagacatgaaatggcccagtttctggaagtgttcgtctagtgaatggccttgcaatggagggaggatgaaagatattggttctgtgatcaaagttcttttgttcaacagatcatggttttgcaaagagagtttagccaattttaatagtttattattttcatctcttgtgaggtcattgttgctgttgttgttgtgaggagtgttgttgccaaataactgtttgtgtagagacttacttaaatattggatacctacaggattgattcgtggttgttctttgaaataggaaaattgattcgatgctatgacagtggtatcggtgtcaacgttactattattactgttgctactactattattacttgtgctgtataattttttattattctttaaaaaactgtaaatgcttcgacttgggtttgaacgtggatgtagatgtgtacatgcagatagatatgtatatatcagtgaccgtgtgtgtgtaaaactagttgaaatagtattttgcatgacctaaaaacattctacctcaatataataaaaaaggaaaagaaatattgataatatacaaaatgaatgaaaacacacaacaaaaggaaaaaaaaattaaaaaggaaaggaaaggaaagtaccataaactattgatatagtgatataaacagcagttgcacggttgtattaacctacaatgtataatatatcccaatcctctataccaatatctataccaatgtctatatctgcatctgtttctatatctatattactgtatttgtatattgatttgttttatgttttgtttttgcgtctacacaacgcattttctattatttttcttccacagagagaaaaaaaccataaaaaataaaaaaacaaaacagaagagaaaagaagaaaatgtggtgtgtgggtgttgtgcctgcacccctcttttttttttcctttttttttttgttttttgggtgcatcgccgtttttttttttttatttttgtttccaggaagattttgacgttactacacccacattttaaataagaaacacaacacaacataaaaattatagatatactcacagatatattcattcatacctacctgttcaaacatgagagtagtgtctacgtggttgcttgtgtgtatagcttgtcaatccttttgatgatctaatcaatcacattagacttttttccttttttcctcaatatcatgtaagtagagttttgcactgttgggatcttccagtccatttcattattttagtatctaattaacctgttctggtgattgtgatcgtggtctttttgaatggtttggtctagtttgatttagtttagtttaatttagagcttgccttttttctgttcatactaaagttctatccgttcatccgcctacaacgatagaagatatacacacatagacaaaaatacacacatatacatatattttcattaatatatattatatatatatatatgtatgtatgtatgtgcgtgtatgttatatggaaaaaaattagttgatgtattcatgcatatacacacaatagtatattaaacattactactatgtcaagcatattaactaaaatcatatcaaattggatgccctccttcgatacctccatagatagaaatctaagcaactatttggcatctaaatattcattcctttgttttctattctttttactatggttcttaattctcctacctatttttaattatctatcttcaaacaatatacatttctttaaaatttaccacactttcagaagatttgtcaaaaataattgttctagactgcatcactcctcattataccataatagatcatttaaactgtgttttactatctgcttcatcatttttttctgttctctgtacaatactcaatcagatcttttacaaatagctaaacggctaggtagaatccccgctttgctactccccatcactctctttatgactttgaaaccctcccctttacccaatagcctctatctcaacttgcttcccttccataaatggctttctagatccttggttttcttttctttactacattcaatcctatacttcgtctactttgttaaataccatgtttggaaacagaggttgctcagactagacaactttttaggtattctcgcactagccctccttttcataatcgctttgtcctccttgccctccattagaaggcttcactacagattcttctacatcctacactacatttctacatggccccttcttataactcttcatattcattcaaggtataaaataactaaatacacttttttgtgtctagccatactgctttaccagatcggctacaggtgccttcacacatccacgatcaaacctagcataactaacatctcaccaaacttgactctcttagagttcccaatgtctcaactggcaaaacaaccggttctaccggcttctcatattagattggttttgaaatccaaaaatatcttcaaaagaatcttctaccttatagttccgctgacacaccctttcactttactgaacttgcctggccagaatacagcccggctgctaataagaaccggtaacttcccacttctagcaaaccacgaatactacgtcaccggagtctacgagcctgtaataaatttcatttccacaacaaagaactatgggatgcccacaaggttcccattattctcccacagcagtgaaaactcgataaggaatccattccaagtcagttcagcacatttgaggtcctcttcactgcatttcttcgtggatgcaagaagagtgttgatttttgttggtggatctgccatatcttttgggttgccacttcttagcgtattgaattttaatggggttatggtgagattggtttggtgtgtcagagactatagagatgtgaaaatactgaattatttgaagattcactattatcaggggctagaaatcttcattagtgggaagagtcaaagttcgaacaacaataataacaacaataacaatgatgatgataatggtggtgatgatgatatcaagattgattattacgattatgatcattcttgctccactcgggcagattcacagacttctttgttacatgaacgtaataatagactgaaatatacagtagattccatcagtgaagatgaaattgattttactggagctgatttgaattcacctttgattaagatattggactccaaaaattccagtaaaaatatgttcaggaaactacaagttatagaacctcctacaaatatgaatactaactgtgttaatctaaattctgatcctaatcacctttgtaccgaggctagaagtgaggaaaatgacgaagaaaggattaaattgccttcgtttgttaaagtatcgtatggtagacctaaattggatgattcttattatgaatggtgtttacaaagagaatgtaactcaacagggaatctatctcaaaacactcataatactaacagtactaatcatacccatagccataattttaatagtgacaccactgctgtttcctgtgttgacaaccagtgtttggagagtgatctaggtgataaagacgaagaaattctgtctaacgtttgggttgttgctgttggtccaacaggattggttaaaactacgagaagttgggctaatgattgtgggttaagatttcatggagaagaatttactttatagaacagcgaggggaaacgtagatacaaaaattatatatatagaattatatatttcctaattaattaatacacatatagtttctcacatctattcacaatttcatatcaatatggcatatattatatctattttcaaataattaagttattttggtggtaaatccacttattaatattattcacaagaaaattcatatgtatccgtagtttatgttgcttttaaaaaaaataaattgtttgaatctttgattcttaataactttttcaaaatatcgaaaatgttgttataagaaataaaatataaacaatttctttattagaagaaaaatagtttcctatataactaacaatataaaatattcttttattcagaaatgctgctcatgtagatgccttataaagataattatactaatatgaaattgttgaaatagaatgttttatgataaaatagatagaacaataagattttagcagacactaaacgataaattgttgagtaataattgttgagaggtcaccaaaagttgttgagtttatttattaaatatcttactgttcgtagaggaaaatggctgaatgttaacatatataaagccaaggatttcatcatacattatttttatcttatttacaatctttctatattattatttctatgttgtatataaagaaagaaagtgaagaactttattataattttgtatactaaatctgtttaatataatattgagaatgtttactatatatccaatgaataaaggcgctcattcccaacagaaattgtactaattagcaattttttgatgacatttatatttaccatattatcaccacaagtactggtataaatttggtaaattctcacacaatatctcaaagttaacgtaaaataataattgatcatatttatattataacaagaaattaactttattttcctggaaataaaggaaataatacaatttttcacattgcttctctagaatatccaattaagatttgctgaaatcgaacgttctaaaataaatagatagaccaattagattttagtaaatattaatcgatgacaaaaagtagaaatttattgtttgcttatcagtagatgtaaacaaaccttatcattaatttggtgccgtacatagacgagatagaccagatatgaaaatatataaagctaacttctttttcatatcatgtttcttttcttgtccatcttttataaatcatcacctatatattatatgtaaataaaaagaaccgaagaactttattataattttgtatactatatatacataaatataacattaagaatgtatactatttatctaataactaaaggcgctaattctcaacagtattctattttaatgtgtacttatcattaagattctttttatttctttattttaacagtggacacttgagagttaaataaaagtgtggctctgctttgtcgtcttttaaagtttgatttcttctcgttaatatatattaattttaaaaagaaaaaaaggcagttttgtaaggttaaagactgcattgtttcaaactttccagtatatattagcaaatttcacttaattttcttttctaacataaatcttctttttttgattcgatttacactattcctgtaacaacttaaatttattagagttagtactatttataaaaccaagtgttatatctcacaaaagtcggtttttatatactagtttttgtggttcagttttactttttttattacatgaaatatgcattggttgatatatcaacctgtaaggagccctaactggaaatcctgaaatacgtagtctgcgggtaacgcctaatgtcgaagcaaaggatttggaacaaccgaaactctgggcccaaggttgtgagtgtattcgaacaaacatatgatcgtcggatggatattggtgacaaattactacgaagcttacttaagaaacccatgattattgagagatagtgccagagataactatcagcattaatatttataatcaatctaataggttaagaagaacaagacgaatatccaagactaatctatttaatagttagaatcaaccaaatatataatttgtaagtgtttatatatataattaatatccatattttagtataccacttgagataacccttacacaaccttggaggatttgctatttgtaatgtagatggtgtcaagctataagaggaatgtagaaaaagatgattggaattattacagatttgttatacttttttcttaaaatttacacttaatgtcccaatcataaacattttaaaaagtaaaaaagattgctcacaaaataaacaaaactgaaaaaaaaaattaatataaagatataacttatgaaacatttaattgcacatattttattatttaaaataattttaaacaaactgtaatatattttaaactcaaaaactttaattcgcacaaaaaccatactacctataatgaaaataactatttttttttcttaaaaataaataatattctctattgacaacatctttttttctatcaatttcttttcaaaagtttctaaattgttaaatatagatataatagtagtattatcgttcaagaacatatctataacgcagttattgttaaaattgaaaattcaaaaaaaaaaaaattgactgaatttttaaaaagatttgatttgattatgaaaaatgtagtgattctgaatgaaaaaaaaaattttttactacaaattttttttttctacaattgtaaaataaacttattgaactttgtttccttcaaattaatatcccccaaagaagaattaaaatttttattatctttgttttgctaaattcttaataaaaaacaataaatgcatcaccatcaatattctagtattgttatgaaaatatgaaagttaaagattacaatattattaataatctcatagaattaattatagctatagaaagatatatatttaaaaaaagaatttgaaactaaaacatcatacttcataaaagtatattcaattggtaaataaatgtaaatctgaaatagaaatattagacaaagtatataatattcaggatatatatttacgtttacttaaaattaaaccttttgtctgtctatttataaaatataacaaaaaaatagggaaaaacaaaaaagcccaaaaaaccaaaaatttaaagcaaaaactactaagtcacctaataaaatgtagtggtaaagagggaaataataatatttctatataaattccactggcaatcccgaaaaattaatacaaaaaagaagattgtaaaccacaaaatgattcctatataagttatttgtaaggaacctaactggaaatccagtagatacgcaactccgagggtaacacctgagtgtctaggtggaggattggtacagtcacgtgcgcagtggctcgtataaggtattgaatctgattggaggatttccagggagtgataattatatcagatcttgtcaagaggcctttgattattgtgagataggctaggggtactcatcttatttaaatacattttagtaatgatattaagagttacatcttaatatcatacaagaacaacaagaagaagtaatacaatatcagggttattaattagtaatatatagagcttacgtaagagtgtttatacttatactaattgatacgattcatccatttacatacaacaactcttacattattattttagtcccacattaacggataatttgaaaaaagtaatggtttccattttttgtatattagtaacattaaaaaaagaaacaaaggaaatatgaatgatattgtaaaaaacaataacttcagacataaaattatatcagtacatgttgattatgttcttacctgtccttgaatctgttatttttttaaaaaatgacacaaaaaattttatatattatataaaatttttatacgtttaatagataaatgttcaaaacttattccaaccattaaaattaaaaaatccaattaatactttaagaaggaacctatatttttatttttataagccaacttcaaaaacaaaagaaaacattggtttattcttatgtattcagtttataggcaatatatggtcatatttttaacatattttgagaaaatattcaatttttcttttaaaagattctttcaaaataatagataaaaacatttcacaattgtttcttagcaatataattcttcgtatttatagaatgtttcgattttttttacaggatggagcttataaaagtcaataatatgttaccgtccaactaatttcacccataaatttttagtcttattgggacaatttttcaacaaattggattaggaatagcagagatgtttgtcctaatcggcacttcctgtttatattatagtatttttttcttttacaaattagcattatctaaggacagtttgtttggcgcttatggacttataaggtatattgataccttgaaagagatcactgcaagagatactaaacagtattataggtaaacgaacaaatatatatatatatattctgtaatattaactttactccacctattattatatggatagtttaaattttatagccatatttatttaatgttagaacaacatatgttacaaagtgtttataaattttccaaaaagaagagtttggaaatatggtgctaacaatcttttttccaaagtaaaagtcaaaaccctaatataatacattgtgacaaccctgagattatttgtttctgataacaattaacatcgttaaaatcacaataacacttcatttgaatagacataagatatagattctttctatatctctagatataatgttactacatatctacatatccctaatataatgaaactagataatatacacttatacacttatacactagatatctacttttatttacttattgttcgttcgttatttctccttcttttatttatgtatgtttgtaaaattttgcaaaaaggaaatgtaatagatgaaaacccgattacgagagatatactcttctagacattaaaatagatagatatagcttgatttattgtctatatatgacatataaactatactctacataaagagtaaactaatatatacagatatacagataaacatagttatataaacaagataaacaagaaaaacaggagcgtcgtcgtcgaccaaggcgttcaccagatcgattatagtgacatccggatttcatatattacaggaaaggttagaaaaataacaccaaccctcatttttctaaaaaaaaccctaaacagcaacatcaaggatattaaaaagaatcgacaccagcaggatttgaaccagcgcgggcagagcccaacagatttcaagtctgtcgccttaaccactcggccatagtgcccaaaatgaactaccatcattgtggaatagaatagttataaccatcaagattacataagatcctgaatgaatctagaactatttattgtattaataagctatacacgtgctacaacattagatgctgcataataaaaagattggattacataagatcttggcaaatctagaatttacctattgttttattaagtcccacgtgtattactaatcaccatgattagagaattgggatgcagttctaatccagtagtgcacctaaattaatataataaattttagggtttgaatcagtcaagtcattaatgtagtaatctgaataatcgatcgagctccagaaaacatataaaaggacaacgttttcaggagataaaagatcatcttccataatcgtttcttgtaaataatttatatattatgtataaacaaaatagaacaagcaagtaacaagtcaagtaacttcgaataagtacattagctcgatataagccgcttaatatataagaccgttttagtaattatactatcgactatagttgattactgtctcgattatttgaattactattaatattatttgcgcttccctggaatacacaaagaacttcaccacaccatactacaacagcagataagcaattctttccgatgtagtgtaacggctatcacatcacgctttcaccgtggagaccggggttcgactccccgcatcggagcttcttttttgcaaccttttggtagcatgtgtaataatccttaggctatgcgtttctaataatagttgattaaagataatattttcaataattcatttagatatgtataacatctgattgagaggtattatttcagtttcaaaatctttattagaaatttttataaaatcaatacaatgaaatgctatggatttgtaatagaatattagtggtgttataggctctcaacatatttatactagattgttagtgctattataactctaacttatattgcttgattttacccagtcttcataactaacagagaaggtataatatatagttagacctgctgtttatttaagtcttttttaatagaagtctttggaactttctctaccatttggtgtggtagatttaagttatccagaatatctctaacttatattttgacagaataacataaacaagaccaaaaacatacattctggaccgcatatttaccgattaaaatatactataaataattgtttatgtaagaaactttcctaaaatctaatagatacataatcttgcgggcaatattccagtgtctgagtggaggattggtacaaccatatactcagtgatcagtttaagctactgaatttatttagaggttttctgaagagtgataacaataccagttcttacccaaaagtccttcgataattgtgggatatgccagaggtaatcatcttatttgaatacaccctagtactgatattaaaagataactcttaatctcgtataaggtcaccaacactaacaaaattaagttaataatactacatcaagtgttgtgcaattttatatactatttacataaaaatgtttatacttatcctacttatttcaattcatctatttatcgaataaaaatttctatacgttgatagtatgaggaattctattatttataacaatataaatataatttagaattgtgcccagtaaaaattaactactcaaagagaataaaccagaatgaaatggatagaataatgtgatcaggatagacaccaaacaataaattgctgaatatttgttgtctatatatcaataaatgccaacaatactatttgcttaatcttttactttttgtagaagaaaactatttaatatccacacatataaattatcataaatcttgaaaaaaaatgtaatcccgaactcaacagaaaaaataacttaccttcactatccagagagcttatgagtcatcaacccatctggtagaaaattataatagattatttgaattatttatgaaaggaaattgaaagaaatattattgatcaaaagaagtttcacagtgatacagcttctttatgcctgtagctttgtgtttgtaatcaaaagaaaagtagtaactatttttttcgctttagaaatactctccaaactcgtagaaactagtaattgctggaatcgaacgttctagaataaataatagaccaattagattttagtaaacattaattgataagcaaaaagtgaagaatgtattatttgcttatcagtagacataaacaaacttcatcataaatttggtgccgtacatagacgagatagaccagatatgaaaatatataaagctaacttctttttcatatcatgtttcttttcttgttcatcttttataaatcatcacctatatattatatataaataaaaagaaccgaagaactttattataattttgtctactaaatctatctaatataatattgagaacgtttactatatatccaatgactgcaggcgttcattctcaacagtaatgaaaagccaaattcaaaatcagaaataagctacaagcatatatattggatcagtcttagcctcatttgttgtgtctcctattttgcaatgaaaatttgacagtaaattccacaatatattttatattatataattaatatatcttctgatgtaatatatatatatatattatttcatatatctaatcatctaggcggataaaaatatcaaatgatataaataaccactatataatacttttattttttacttaagtgataatatctattagtccataaagtatatttatgcatgtcaatttttaacattgtttaatgataaagctcttttgcaaaatatctgtaaaacacaactttattagtaattaaatcaagagatatttcattgttattactaattagatgtattggacttccatacagatgttaaacattttctttgttagtcttaaggaaagaagaaattgcttgaactggatgtgatttgctagactcttgtaactgctcaaaaatgcgctttcaaacaaccctgacattctttccatgacattactctcgctttcattgtcaacattacattgttcttgttattcttatatttttactacttttatactatttgccctatagcttcgtacgacatgatatacacaagttgttttcacttttttttctctctttccttgttttattattattattattattattattattattattatttttttttttttttttttttttaaattcctaaaacaagtttaagtaacccaaataattctgaagagtacgtaaagttttcaagaaagtctattaaactattacattcagcgttggctagagtttgatacatagtctctttgtttccttgtttctttttatttctttcctgcaagcgtatgaaacaatactaatattaccatcactataatatttttcagtaagcgtgctatttggattatttggttttcttttctacttaactacaatcaatcaaataaatataatatatacaatagaatataataaaataacattataaccatatctcccataaagtcacagtattatccgcataagagtataaagttaatcagaatatgacacgccaacagtcacagtttgtaggatttggtgttcaggtggaattaaaagatggaaagttaattcaggggaaaattggaaaggctacttcaaaaggtttaaccttatatgacgttgaattcagtgatggtggtacatcacaagcttttaaagtcagagcttcgagattgaaagatttaaaagtattaagtgtagcccaaaacaaccgtattggtaataaacaaaatagagtctacaataacaataacaagaatggtagcataagagaaaataacaaatttagtgggtttaatagtaaccaaagcagtaccatatctaacaatagcattaataaaaacgatataaaacaaaataatggcagaaactctaataataacagcaatcataatactggtagtagtaataataccgaaagtgataattggcagaatgatgacattagaaagattaaagaaagtgaggattttgattttcaaggaaaccttaatatgttcaataaaaaagatgtttttgcacaattgaaacaacaagataccgttgattcggcgcaacgactaatctcacataacagaaaacctattgataataattataaaaatggaagaaatggtaaagattcttctcttgatttgttgaataatagtaataataactttgatatagatgaaatggttatacccaatgctaaaaaagatgcttgggaccaaataatgtacgatagccgaatgcaaaataatgataaatttggatctagtgacaacaacgatgagaatgaggatgaagatgaggacgatgactatgatgaagagtttgaagatgcaaactatttccctatcacaaaatcaattaatattacacatcttttacattcagctgttaatagtacaaataatgattcaagagatgataataacaatgatcgaaacggtaatagtgagttactatctaaattagagaagatgataattaatgaaacatcaaagaccgcaagatcaaattccatctccaacttcaatccaatattaattaatcccaaaaataataaagaaattccaatggctactccagtacaattattggaaatagaaagattaactgaagagacatttcatatttcaatgaatgactgcattgataataactttgcattaaatgcatcttattacataagacaaaaactaggtggtgaatctcgtttaactatgaataattctaatcctgaaccattagttgttgtgttagcttctgattcaaatagatcgggcagaaaagcattagccctatcaagatatttgtgtcaaactcagcaagttcgtgttttaatggtatttagttgttcaatgaaaaatattgaagaaaacaataaagtactaaaggcaaatattgatatttttgttaaatgtggagggaaaatagctacggatataaagcaattaaagacgattttaactacactaaatagcccgattgaaatagtaattgatgctatacaagggtttgattgcaatctaattgattttgatatatcacagaatagaattatagatatgatcaattggtgtaatgaaactattgaaaataataatgtcaaagtatattcaatagatatgccatcagggtatgacagtggatctggcttacaaaatttcgatgttgctatgcatagaattgatcgtgtgttatgttcttatacttggccattaattgcattagccaatatgaaatcaatcatcgcaaacagtaatcatgaaaatgacggtaatattattttagttgattgtggaattccacagaatgtgtatttagaaagaaattccttacgtaaattccatagtgttgatacttttaccacaaaggggtatttgagtttaagtttatagatatgattttttactattatcattaattcttttttgctagtttctgtttctgtttaggttcgacttaaatctgtttatgtgatttatattattggcattgccatttacaattaatatttctcacttcggcaagggtagaaatatatcatgttttcttctgttatttataacaattatattttacattcgagtatgcaattgaaaaagcgaggggggataaggaaaaacgatatcttttttgttttttgtcttattttttgataacttaacaaatatctacataattgtatacttatataacaatctataaaatattagaaacttaaatgaaagggatgacacatatgatgctagattaatcataagaaaggataattattactttattagaaaatttagtaaattatgaattactgtatcataccactcttagttaaaaattatttacaaaaaatgtgacgattatattttgttatgcaaacaaatatgcatgtacttattttagtagaatctgttctttccaatatcttgatgtctaacctaataatcaagcaattaaatatgaaaaaaaagtatgtaatataataacagagatttactgaggagatacacaaaaatagaaattcgataacagaaaaaaaaaaagcaaaaaaaaaaaattaaaaaaataaaaataaaactagaaaaaggacaaaagggcagaaaagcgaaattttaagctggaaatagagtgagagacacaaacatagggagaaacagataagatcaactagaggaaaatactatacctctattctgtattatatacagacagatagacatttatattctatttgattgtcctgagtaaacaaactcataacagtaccaatcacctattgttatcttctagtagcattaattcttttctcaactattgaaaatttgaccttatttttagcattttatctatatatttgaaggttgttattattactgggtataaccaatattaagaagttataattttagaagttagtctattctacattccaattgaagaatttagtcaatttactgttaagtcaaagtaaattaccatcattactattattatttatatattgaatagcaaaataaactataagaaacgaaaaaaactatatccttccaacctgtcgttagaaaaaaaagtgtaaaacaaataacatattaaatgggtgcttgttgtagttgttataaaaatccttccatttcagataatcttgcaggtgttgatacagatggcaataatttaggtgtcaatggaggtggcactgatgatacaagcgtccttccaatcgctgataatgaaagggaagcagtaactgctctattgggatatttagaagataaagataatttagatttctattcaggtggcccattaaaagcattgactactctggtttattctgataatttaaatttacaaagaagtgctgctctagcctttgctgaaattaccgaaaaatatgtaagacaagtttctagagaagtattagagcctatattaattcttttacaaagtgatgattcacaaattcaagttgcagcttgtgctgcgctgggaaatttagctgttaataatgaaaacaaattacttattgtagaaatgggtggattagagccattaattaaacaaatgctaggtgataatgttgaagtacaatgtaatgcagttggctgtataactaatttggctaccagagatgacaataagtataagattgccacgtcaggtgcattaataccactaactaaattagctaaatccaaacacattagagtccaaagaaacgctacaggtgcattattaaatatgacacactcagaggaaaatagaaaagaattggttaatgcaggcgctgtaccagttttagtatcattattatcatcaactgatcctgatgttcaatattattgtactactgcactttctaatattgctgttgatgaagctaacagaacaaaattggcacaaacagaaccaaggttagtctctaaattggttagtttgatggattctccatcttcaagagttaaatgccaagctactttggctttaagaaacctagcatcagatacatcatatcaattagaaatagttagagcaggtggattaccacatttagttaaattgatcaaaagtgattcaattccattacttttagctagtgttgcatgcattagaaatatctcaattcatccattaaacgaaggtctaatagtagatactgggttcctaaaacctttagtgaaattattggactataaagattccgaagagattcaatgtcatgcagtttcaactttaaggaatcttgctgcatcttctgaaaagaatcgtaaagaattttttgaaagtggtgccattgaaaaatgtaaagaaatggcagtcagttcaccaatcagtgtacaaagtgagatttctgcttgttttgcaattttagcattagcagatgtatctaaactagaccttttaaatgctggtattttagatgctttaattccaatgactttatcaccaaaccaagaagtatcaggaaattctgccgctgccttagcgaacttatgttccagaattaataattatcaaaaaatcatccaatgttggaatgaacctgatgatggtattcgtggttttttaatcagatttttacaaagtgattatgctactttcgaacatattgctttatggactatactacaacttttagaaagtcataacgttaaaattttagaattaattaaacaagatgatgagctggtatcaggagtgaaaaaaatggctgtttttacatccaataggttaaaaaaatcaggatacgatgtaaaaggagatgatacacaaaagaataaaaagaataagaacaatgataatgataataataataataataataataataataaaaatactgttaataatgcaggacaaaccgttacagatgatgatatagaaaattctgagttatctgaatctggggaagatgcaagcttggaattatataatataacacaacaaatcttggaatttttacattgaataataaaagaaatttatgggaataaagataatagataaaaaaaaacaaatatttcaagaaattatcatttgctaaaacattatttatacaatataatttttaaaaaatagaaaagtgactttaatatatattttaattagacaaattctgtattaagtacatgcaaaataatttattaattttattctatctttgtgaaaatatattatatgtcattaagtaagaaagttttgttatcatatatgcatccatagaattaatatttaaatctataagaactcaaaaaaaaagagtgaattgtttaagtattagaaagaacaatggttaagaagcaaaagaaaaccaatacatacgctcttttttttctcttaattttttttcattaatttatatgccactatgaatttgtcttatattatttttgtccttctgaagttttctgtatttcttaaaaaaaacaacattataatatcttggcatttctcttgggaaacaacccaatatatgaatgttattaaataatgataatgtgataaacaataacattaaaactatacaactcaacatgaaaaaaaggaatccctacgttttttctttaatggtaatattactattaagcccttctctcttgcctgttctttcgatcatacatcatttaatgcaacacatgtcacgcctttatggtgaccaccatattgcctgactatctctcttgttgatagatcccaaagtctaacgtaatgatcagaagaagcagtaaccaaatatgcactatcagcacttaaagcacaatcccatacccacctttgatgaccatctaatgtagattccaatttgaaattatcatcaacagaccagacccttgcagtttgatcagctgaacaagttgccagatgtttagcgtctgatgataaaagaattcttgtaatatagttattatgagctctaaatttggttactggctttaaatttgatgcatctgtatgattttgcatttcccaaacaaaacaatttcctttattatttgcagccactaacattgacccatcactagccacagataatgattgtaaagatatatcatcttctggtgtcaattgatgggtacattgattttctcctaaatcccaaatacgtatatttccgtctctgtcgcatgatatcaattcaccttggtttggatgtatgaccacttcattaactggtgcattatgtttatagttttttggtatggatggagatctaacatcccaaactttaatagttccatcctcgctagatgttaccatccatttattgtcttgttgaaatgataatgacgtgacgtttcctttatggccctcaaaagacgctactggatttgggttggttgttctaatatcatataatctaacattttggtgtcctgctgcggctaaaaatttcttatcatttgtgatctccaatctattcacttgagactcagaatgctgaatggttctcgagcaaacacctgttagtgcctcccaaaatctaatagtatgatcataaccagcagatactaaaataacagacatcttttgatgaaaatcttggtagtaatggagtagtagtagtagtaatagtaatagtagttttatttgtctattattattatctcacttactagggatatatgtatatatatatgaaatgtctttttattttcgcgtatctacatacacaatattattactactctacattgtttaccagttattaaattcaattaccgtttgttactatctgttattgtgttattacttcaatttgtggcataagtatttagtcaaacattaacaacttcttgttttgcttttcattcaatgatatctcctagggtttagtatagaaaggattttattttcccaaacaatgtctcaattatttgagaaaaacagagattaacaagaagaaaaagaagaggcaaaagaatagcctggtagaattattgttaaccttcctcttgaaatttatctttccacttctagggcttaaagaagttttccagatttttcatatttttttcctttcttttttttgctttttttttttcctgtttctccttttctgcttgctgtcctcgaggaaaaaatgagatcaaaaaagaggaacaggaaacaaaaaaaatgggggggaggtagaaaagtattttgagtgttaaagggattttgacgaaattccttttccctttccttttccttttttttttttttttgatccagaaccttctagaaatttttaaaggagaaaataagaaatcaaaggagagagaaagaaaaataaaaaaggaacaaaagaacaaaaatagtcctataccccattatatttcaggtaggatcaaaggtgaaatataagatagggaaaaaaaaaatatgtatatatatatatatatttagatcaaacgtttttattgctcttaaggagtatctccgaaagtcaaggaaaagtatatacatgtatgtgtcaacatttcttgctcggcaatttcacttgcaatttgtgcaatttcttttctgctcattatatgtcgaacccttgtttaaatggtgcacaccagtgtaacaacgataatatcatttgttaaaagaactctaggagtacgtaacagcgtttactgaaggtgttattctaaagttatttgagtttttaataatacatatacatacatacatacaaataaaaaatggttaaagatactaaactttacgacttattgaatgtatctccaactgctaacgaacaagaaattaagaaaggttatagaaaagctgctcttaagtaccacccagataaacccactggtgacactgaaaagtttaaagaaatttcagaagcttttgaaatattaagtgatccacaaaaaagagaaatatacgatcaattcggtttagaggctgcaagacaaggtggtcctacttttggtgccggtggtgccggcggtgctggtggatttggtggtgctcaccgtttctctaatgaagatgctttcaatatcttctcacaattctttggtggtagctctccattcggtagtgcaggagatgatagtaccttttcattccaaagtttcggcggtgcaccaggtggtggatttacctcatttggtggtatgccaggtggtatgggtggaggtatgcggtggaggtatgccgggaggtatgccaggtggatttagatcagcttctccacctgttcaagaagaaaccgtccaagttaatttacctgtctccttagaagatttatttattggtaaaaagaagtcatttaaagttggtgtaaaggatcaaagaggtgttcaagaaaagaaacaaatcgatattcagttaaaaccaggttggaaagcgggcactaaaattacatacaagaattatggtgattataatccacaaaccggtggtagaaagactttacaatttgttattcaagaaaaaccacatcctgtatttaaaagaaatggtgatgatttagaatgtgttataccccttacatttaaagaatctttattaggtttttctaagactatacagacaattgatggaagaacattacctatctcaagaagctcgcctgttcaaccaactgaaacttctagatatccaggtcaaggtatgccactttccaagaacccttcgcaaaggggtgatttaattgttcgttataagattgattatccaatttctctaaatgatgtccaaaagaatgtcattgcccaaaatttttaaatgaatttaaacatatatagattataaaacaaacaaaaacaataataaaaataaaaatactccaacaaaaaagcaatatttaaatcatcttagtattaaagatatgtaatattttccttttatataaatttaacatgcataagtgtatatatatagatatatgtattatcatttttttcagattctaataataaacttcattattaaaatatatattctataggagactaattttttttcacataggctttataaatttttggtgtcgctgcctcttctatacacaaatacatatatatatgtgtgtgtgtatttctatcattaagattaaattatatagattttataaattgatctatacaaaggtcatttagatgcaataaaaaaattgaacttttttttttcttcgattttttaattgtccatcaattctgcaacagttctttctccactcaaaacatttttcatactctccaagatatctttaaaagtatcaaattcatggtatggaacattttgtttcttacaataagtaatcaaatctttaccacgcttagcaaataataaatcacattctttagcagcacttaggtcagagataccatcaccacagtagaaatatgttggtctaacttgaccatcagctaaatctttttcaaagttttccttatataaaccaatagtctttgatttatcatgtccaaatggagtctcatctctgtagactacggtcattttattgttttcatccaattcaacatcgttagatacgatatcaatcttgtcgatatgttctgcaccaagcaaattagttaaaagatgtttaatgattgggtgcatgccactagagacaacaatgataggaacattgttggcttgggcccagtcaaaagtttctttaaaacctggatctaattgaatcttctcttccaatattttcacactctctggcaatggagaggtaattgaattgatcatacgagtgaatccctctctgaaagaggtagtcccatcaagaacaccttcgaagattcttagtctttcttccttaccaaaacctaaagtgtcagttaaatagtcattggaatcctgccatgtaacagtaccgtcgaaatcagtaaaaataacagcttttggaatcataatataatacaatgctctaagtttgttgggtttttatttacaagacaagaccgacatcaactgtatgtaaaggcatggtactgcaataagttagacttgtgcaactgataaaatattataagaaaaacaaaaaaaaaaactttcttatgtcgaacgtcttattttttttcttttttttctcgagaaaagaatgctcaatacttttgaacgtcaccgaactttcaattttgtatttttttttttttcattttttctattcttttctttttttattttagtctctctttcattttttctcctcagtgtatcactgcacggcgctatttcggttttatgtccttttttggcagtcgtagtctcgactcctctacccctttcttctaaaaggctgatctggaattttccctttcgctagttcttcaagtaagttttgtacaacctgtcacaaagtccattcaagaaaaatatatagtcactgaaggagtcaacgccattatagatttaattttccatatatatatatatatatatgttgcaagattatcaatctaattttagaaacaaatttctaagaaaaacatacattacttctcagaattgtttacagtccttaataaataaacaaattcactgacatattatctcaacaaacaatcgatcaatcaaaaatattaagagcaaaaaataagaaaatgaatttagtagtattttcaggtggtaccgcaacaaacaaccttactccgagcttttataatttaactgtgaaaaagtaccacgagctgacttttgttttgcccatttctgataatggcggttcaaccagtgaaatattaagggttttaggtgggcctgctattggtgacattcgatcaagaattgttagattaattgaagaagaaactttggtcaaaatttttagttatcgtttacctaatgattattcaaaggctaaactggaatggaacgacattgtagaggggatccatccaatttggaatcatgtgtcaccatctgtaaaagaaatgtgcagagcatttttaattcatattcaatcagaattattgaaaaaaaataaaggtttacataacaaatttcaatttgaaaaggcttcagttggtaatctatttttaactggcgcaagactatttttaggaagtctggatgcatctattgagttaatgatgaggattggaaggtgtaatcgaaatgtaaatattattccatgtatcaatacaaatcatacacaccatatttctgcattattgacaaatggtgatgtaatcaccgggcaatcccaaatttctcatccttcaaagccatcaattaatagattagcctctagacatagtacatctttacaaaataaaaatgatatcttcgaagacattactaatattcagaatgataatactagtgttaatgactcataccctaatcatgcagagagtaaaacaccactagaagaaattcgtgcattttcctcaaatgggaattacacaggtcacaatcatcaaactgcacagaaaagagaagaggaacacgaagaagaagaagaagaagaagaagaatatgccaatccagtttatattttacctgaattaaagaattctcaactacattttagtaaacaagaaacagataacttgttaccttctccagtgaaaaggattctttatataaatccttatggagaagaaatcaaaccaacagctaatgttagagctattgctaagataaaaactgcagacattatagtatattctattggttcattaatgacaagtcttttaccaatcattattttaggtaatttagctcacacaatatttgaaaagaatggaactcataaggttttaattatcaataataagtatgacagagaaacatttgggttagatgcaattcactatattaaaatgattattgactctatgttgagatcaataattagctacagacagagtaaagggcttcctgtgacaggtttaaaggatgctccatggaataaatttataactgacatcatatacttaactgagggtgaaattcagatggattgggatttgttacataagaagggtattataacacatgctattaattcaaataaattagaaaatgaagatttggaaaatgttctaaataaaattcattcttctgatatttgtcaagcacattattaaagctgtaaaagcaatgtttagttatattatttgtaaaaaaaaattatataacatgtaaacttgtattccaaactctcttcactttagaaacagaatcagttaaaaatgtaaatatataatgaataaatattgcttttatctttttgcagtacataaaaagatttaaaatagtaattgtaatgtttaggtttgtgtaaatagcctttattgtcaaatatagtatttttttgtctttttaacaaaaaacagagtaaataatcgcccatactaataataatagtatgggcgattatcatttttaattcccacgtcttctccacaaaatattgacctgtcattcaacactattctttatacctcctctttagaagctgtaactttgaatataaatatatttgaataagaactattctcatgatctctgtaattaattaataatggagaaatattaatgtcataatcataaggtttgaaataacaggcaaaaacaaatagaagttttttaaggtagaattcagagtaataattttttttttcttgtaaataatcaatcttatctagtctcaagagatttataacattcttttggtgtggtttcacttagatattatcatctattcttgtaacaatgattaaagtaaatgtcactatttgtatagataaaatcaagtttttagagagatattctcttcatttttattattaataataggataaatatattcatctttaatgatacaggtagtaatatttgtatttgtcgaaatagaatgttctataatgaaatagatagaacaataagattttagcagacattaaacgattaattattgagaggtcaccaaaagttgttgagtttgtttattaaatgtcttactgttcgtagaggaaaatggctaaatgttaacatatataaagccaaggatttcatcatacattatttttatcttatttacaatctttgtatattattatttctatgttgtatatagagaaagaaagtgaagaactttattataattttgtatactaaatctgtataatataatattgagaatgtttactatatatccaatgaatacaggcgctcattctcaacagtattgttgtattgaaaaaataggtttggataatgcattatacaatttgtccataatttgttccttttttttctcttctctttttgataactattattgattatagaatagttgttacattcatcgattttaaatatttctagcatattaccaaaattaaacataataataataaagtttaagatgattttctctaaacaaaggctactccactattaaaaattgatgaagatattgttacgataaatccaacatcataaaactgtgtgtaacatttttcagatatactattttctaaaaatgaccctaaatatttaagttctgcaaaaattccaccgtttttttcacctattaaatttaaatgaagtaaatacaaatgtcaagttccttcgatttttgttttcatagttggcagaaagaattgggattaacatctgatttaagctaaaataagcatttatacgaattaaattattaaatgaagtgggatttgacaaaattagcagtttattaacttagtgaatcaatatttcaccctgaggctaaaaagctctgtctgttaaactttaagatgaatatttagtaaaaattttgaaaattgtgtagtaagtttagatcttttaacaaatttgattactttatggggaacaacattctttaaaagccactttgttaaattgagaacaaaaaaaaattgtcctcttctggaataaattttattatcataattttcacattgtgaagatcttgtgaatttattgagtgaacgttgtgttagatattcaaattttttgtcaatattgatattgtcatatatattataggttatcatattaaaatcaaagacacccaccaatatatatgatttctaactctctttattttaaaaactcattagaatcaatttgtaaagaataaggtcaagaagtgtccaactactatttgcgaagttggaaataaatattaaagatttaaaaatatcaataaaaaagcattctgatatgagaagcacaatattcggtgaatgttttaatacatcctttacaagttcggaagttaaagtaaattttgcatcatcaaaggtgttaagatattccataaatttctagcctgtgaaagataatatttttgagtgacatactcctcttctactttaactaattgatttttgagtttgttgaattaaatgtagtctgacacagcttcaattggaaatcttctagttagattgttttatcttcattatgcttgactgttcatgtactctttttttgataatgtagtttttgactattaattgagtttaactaatctaatttttaaaaacttattccaataaatgcaaaatatcagaataaagatagtagtctagtattttcacatattctgtatcaattatataatatatatatatttattcagaatatttttctgtctataaagctaaatgtgaataaaacattagtgagttaacataattagccttttcttttaatccaaatatggaaatagtaaaaattctatagtgatgcaatagcaagataaaaaccttggttttatattaccttatattgggggagttgtaatttttttattttgtatattaatgaagtagcagtgttagaacttgacaacaagatgatatctttagatatagtgcatatattttctttttcagttcaatggaaaaagtaaaagtaagttaaaatagagaaatgtaccagcgagaaaggtgggttaaaagtaatcaagtgaaacagttaatttcgatttgattacacattgaaatcttagcccagtattctcgaagatgtcggataaaactgttacaaggtaattgaaatataagatttgattaatatgccgttgagtgcatttttagtttcattaattagtggtgcagctgcaggcacatcaactgatattgttttcttccccatagacactgttaaaactcgactacaggccaaggggggattcttcaaaaatggtggatatcataatatttacaaaggtgttggaagtgccattatagcatctgctcctggtgcatctcttttttttataacatatgattctatgaaagaatattccaaaccatggattcaacgatttgatagaatgcaacatcatgaacaattctctgaaactttatcccatatgttgtcatcctcactgggagaaattgcggcgtgtacagtaagggtaccagctgaagttatcaagcaaagaacacaaacaggtcttacaagctcgtcatataatactctcttgatgcttttgaagaacaaaaatggagaaggtgtcttacggaatttatataggggttataacactacaattatgagggaaattccttttacttgtattcagtttccattgtatgagtttttcaagaagaaatgggcattatatcaaagcaagtcaaatatcttaaagccatggcaaggtgcaatttgtggatccatcgcaggaggtattgctgctgctcttacaactcctttagactttatcaaaactcgtttaatgctaagtgataaaagcatacctgcatttcaattgaccaaaactatatgggtggaagagggtccacttattttttttagtggtataggtcctagaacagtatggataagcgcaggaggtgctatatttctaggcatgtacgaaactgttaaatatattattacaaaagatcatctattagcatactagacacagcaaagttttggcaaaatatgtatagtagctaatttaaagtatcaaaaaagatccatgtgatattcctcatagaatactgtagatagtagataggtgtgtagaagaaaattcttttcccttttttatgtaagactgtttagtttaaacaatgtttaaaccaaccgtatctttacgtttaataaaaatagtctgtactaattaataaacttacaatgtccatcatccctcttgtcgtcttaaatgatcttctaaataaaattgtcatcattgttattatcgttattttttgacaattaaatcgtcagtaatttttttttctgtttattttatcctttcgatggaatgaaaaatagagtatatctgaactgtttaatgtagaagaggacttgctcattatttattactagctctattggttttctttcgttacgacatggtatagtattgaacacacctttgagaagtgatcaaaaatgaaaagaaccacagaaactgtatgtaacaaaatatctgaaaaggttttcaatatgtgtcaggtaatggatggtattataatttaggaagaactgtgatgcatcaattaatgtgattgaagccattagaaggatagattggatattaatctattttttttttttggctattggaaaaattatggtacaaaaggataattatcatgtccttcatctttatttgtttctatgcttctggtgattatactggttttttattccattgaatattattcaattctttttgttcattgatgtgtgacgctctgctaaataagaatcctgtttgacttcattattagaattattatttactaatacgttatatttaaggaaataaattagacattgcaagaaaatatgaagaacatattggtgtttttttatttagtattgatgttgtttatgtacaatattttctagctaatgttctctttttattcatggaattttcattttagagagattcttatcgtagtaggtcaagatctccatctcgttatgattatcgtgatgaatatgaacgcgaaactaggagaagttaccgtggaagctatggaaaccgtgagaaagagaattatagaagaaaagatacatacgaaaaagatagttacaaaataaggaacaataatagagggagagacagatattctaacgactggggcaggagagacgacggcagatatagagaacgtcaatataatagtaagggtcgtaatgactctagaatgggaagtagataccgtaatacaagaggagattatgggccaattttggctagagagttggatagttcatacgatgaaaaggtaaacagaaactttgcaaatagtatttttgtcggtaacttgacatacgattgtactcctgatgatcttaaaaaatatttttctggtattggtgaagttgtccgtgcagatattataacgtcaaggggacatcatagagggatgggaactgtagagttcactaatactagagacgtagatgaagcaattcgtcaatatgatggttcgttttttatggacagatctatttttgtaagacaggataacccacctccagaagataaacgtgatagattccaaagtaaaagaatatcaagagaaagtcgtaagagagatagtcgagaatcatttactgtttatgtagaaaacttaccatactctgtcaattggcaagcccttaaagacatgtttaaagaatgtggtgaggttttgcatgcagatgtcgaaattgacagtagtggttattcaaagggaaggggtgttgtagtattccctaatgaagaaacaatgaaaagagcaattaggatgtataataattatgagatgaatggaaaaactttagtagttactccatcacgttatgattcaaaagattaccaagaaaattttgactcagaacaagctactgctgttggtgtggaaggagatattgatgatgttgatatagatgcagctaatagatttactgaaggttatgaggcagaaggagatcgtaataattttatattctgtagtaatttaccggaatctactgctaaaagtgatctttttgatttattcggtacaattggtaatgttgtaaatgctgaattgagatatgaccctttaggtgcaccaactggtattgcagtaattcaatacagtgatatatcagatgcggatgtgtgtattgaaagattgcatggttacaattatggtggatgtgatttaaatgtttcttatgctaagaaagtttaaaatggcgcaattatatgtagaatataggtatatatattgacgcttgtatactataaaaaatattaagtgttgatgatttaagaatatatccaaaattaaggtagtgctgcaacttgattttgtctattcacacacaatcaggcttatgtaaatcactgaggtataggccttaagcttagatttaaacaatttgttatttgtttttatactataacttttcttcaaattatacagttgttattcattcatgtttacaggtctacttgagcatgaatactttatatatattagggcaaatattaaataaagaataaatccaaataaaaaaataaaaaagaaggattagaggaaaagatatatcttcacagattttttcaatggtcataaattagatacttccttaaattttatcatagtttttcttttgttttgtttttatgaatagtcatgtaaatagattatataatgttagaatggatagaacattgaagtagaatattctaaaaaatatattcttttaacaaatcaagattgtcagtcattatataaaagttttccgagtaaatttgtttatgtagcgttccagttttttgaaaaatagatgacgttgtttccaaatagtatcaattgttttcttttcttttatgagattgaattccaagccttaataattatgataatgttgtttgattatataaagtactaaccgatatcatttgctatatacatgtcacataaatatacacatggtgcctactgaataattaaaagaattcattagtaaaaaaagaaaataagacttggtgattatttaacaatcagacttttgcatttttctctgattgaaggattgagttgatttttcttttgagtttgttctcttctcttaacgaaaggaaagatgaaggatttattgttgaatctttgatttttttagctgtagcaactggttcttctgttaaattatgatgtagttcctttttcaacttctccttttcttccagcgatataaagtttatcaatttgaacttattgtcaaaggatacgttattgtctagatatttacaggttgaattgattttgtgtttgtaagtggataccttttccaaagaccattgttcacgttttccttgaagatctacttctgacttcagatattgttgagaataaaattgagcatctttgagcagaaacccatttcttagcaacattcttaaacgaacaaggtaattggctgcaatgttggtatcaacattttccacactaattatatctttcaatgaagatttaaaattgtttaatagttttagtcgatcctcaatcctttcattatactttttcataatagaatccttaactaaatattgttttctacttaatgaattttcttcttttaaagcagcctttttgttatccaatagaatgtgtccaaaccgtctgaccctgggatcaaaatgtggtctgggtagttttatatcttctcttaaggatacaccaacaaatttctttcttggatggaaagggtcaaggtaatatcgtacaaaccctggctctaaagcgaaaagggtgtggtctttaccaattccaacatactcccctgggtaaattttagttcctctttgtctcataataatttcaccaacttttactcgctgaccatcatattttttgggacctagtctacgccctgcagaatccttcatggaagttctagaacccgccgcccttttcgtagcagttctgatttgaatatatattggggaattagaaggcttaataatttgaaataatgacagcattacgtacagtactttatcaggatccctgtgtgtagcctattcaatcttattaaaacgtcacctatccttcacacaaacagtaaggaatccgcagggtaatgatgagaataatagtgttatgtctctgctttatctagtttctctttgtctttttatattttattttcttcctagagatctacttgagacaatcgtacaccattacttgtattatccttttgaaaacatgggaggaactatttttgttgtgggttaaaagaaaaaggagatttaagagaaaagagacggctttgagaacgcgggaaaagataaatctgctaaattttctttattttcttttttttttttttttttttgtaaccaccgggcctcgaaactcctaactacttccgttttagatctcgtcaaaaaaagaaaaaaagaaaaaaaaaaattagagagaaaatatcttgtaaaacacaagagatgtttatggtcatttcaggtattgtaaaaatagatacgtctacattaacgtcatgtgatgtatattcagccctgtaagaatttctagagaaactgtgagatataactagccgatatatttatcgatatttaatatgaatgatcctagcttgcaggaattggactcttctccatataccccaaaggactctatcaatattagaaaattcttcaaggtccatcaagcatgcaatcagctcttggatgctgtaagggttatctacaataattctttaagtgaagaggaaatagaagtattttcaaacagcactaataagatagaaaatgctattgcagaaagtcctgctacatatatagcatcttatttaagtgatatcaagtccactattgatctggaatcaatatttcaacattattcatttaatggagtgagttcgccagttcatcattttattcattatcctgtagtatcagatcctacactagaaacattggcatttattcatagaagttatccaaatatgaatgtaaatttgactgaaacacaaaagactttaatgagtaatgaaagattggaatttttaggtgatagttggttaggagctttaattgcatacattatttacgaaaaatatccctatgcagatgcaggtgctttatccaaaatgaaaagtgctattgttaacaatagtaatttagaaaaaatatcgactaagttacgatttaaagaaagactaaaagaaaatattccaagattttcgatgaaatttaaagataaattttctaagtattatgcggattgtgtagaagcctatattggtgcattagttattgaccgattttcagttgaatttaaggaaattgccgattggttggaagaattgtctcaagataaatttgcagaactaggtccagaaatgttaaaaaagcctttgaataaaaatgccaaaggtgaattagcagaattattacaatttaataagattggtgcaaaaatattttataggagaatcactacaacaccaccatttactgtagaagtactattaggtgacaaagttctagcattaggtactggtgctaatgtcagggaagctgaacaaagagcagccatggaagttttaggtaacccagatttaattcagaaatattctctgtataaaatagaaactaatgatgtggcaaaacatttagtagaggaaattccaataagaaaaggcatattaccagggcataaggttgatgatattgaaacaccgatttcaataaggcgttcattaattgcagaaagatataatactaaaaattctatagagagtagtgtcgtttctgagtctgagaagtttaattctgatttggaacaacaagatttgataagtatcagttctgaagaacaatataaggaacagaataaggaatttagaggagtggatagtagtattgagtgtaaagctccatacgatatcactaatatagatgcattggcagaagcaattctggaaaaaatgggtacagttcttcgtccaatggtcacaggtattgtttctgatttggaggaaacaaaaaatgataagtttagtaaatctacaatgttaaaggatgataaaaaaacattgtttttaagaccaattgtctctaatattccatctttaccacctaaaccggttagaagaaacaatgcaacattagtagctaaaacaacagaaaaggataaagcggtaactgatttgaaaaagaaatcagatgaacaagctaataaagctttgttggataatattccatttgataaacaggcatctagtactttatatacaactttgggttcagtaaacttatttcccacgtatgagatcataatgttagattctggtggatttcgttccacttgtagtattatgggtgtcggaacagttttggctgaaggtataggtagaagtaaaaaaattgctcagcatatttcagccagtaatgccttacaaagcgaagcactacaaaaagttttaagagatgctgttcaaggataaatggtaatgggttatgattgtcggctattttggatattgatagatgttgctgcagaataacatattaatacatacaagagatattaaatagtattttttttagaatatactgtagatttaacacatattaagagtgctgaaactcatttagaatcagtggaatccttatacgggaaattttcacagattaacttgtcaggaaaatataaacaattaagattcagaaattcgagcggaaaaaaatataacatttgttttatagaaccagcgctaataataattcatagttgaggttatgaatatttacttatgtgtgtgttattattcatcgtcacaacataacttattggtatgtataaatgtttattttcttgtgttatacaaagcataaatattatgtattaagactatatgatgataacatataaagagtgttaaagaatttttatttacttctttacctatgaataaaagttttcaaataaaattaattattacttaaagtaattattgaattttaataactttcagcaatagttttcatgagttaaacgtaaatttctctgactttttttaaccctattcaaatataactgtcatatatttaatatatatgaatatatgtgtatattttgtagaaaaatttactgttacgaaaagcaactttgtttaaaattttaatgttaatatcatggtatacgaagtactctctcaagcataaaatttatcttttatagtaaaaattttcaaaaaatattgtaatatcattataaacgttattaaaataaaataaaaacttcggaaataaaatatgaaactatataatattttaatattataaaaatttaatattttaaattatccacgtgtccattaaaatcgtgtatagcgatagaaagcatttcgttatttattattttaaattttattaaaatatgattatgttataatgtgtattaactattcttttttattacgagacaaagattttttaaataaaagaatgaatattataaaagaagcgtttttgtgtaatatataactttctattatttcgtataggaaaaataaaacaggtttaaaccttagtcattgttgtagttctgaattggtattatatgccttattttaatgaaaacagatatgattaaagagaagaaagaaaatatttagtatgaaaaactttatctatactgtaaataagataagaagtaggcagaatatgtggaaataataataattgttagataatggatactatacttattatgtgtctgtaatgaagaatggtttgttatttggttgtctttagaagattagaagtattctattaggaaaaatactttaaaaggaggaatacatttattcaagattgatgagtctagatataaatttgtataaattttcattcgtatcttgatattttcaatgtacttataaattatgtaattatttaacttaaaatattcctaactttagacaattttgagttgtgcattactagaacaattacttttctattataatttatgatatttattctgtaattcatttgaaaataaatgtttttttaaaagagaaaattatttcttgtaaatagggaaggtagaataaggaatgggatataaatttaaaataagcactattaaagtgtatataattgtatatctttttaatcacttttagttttaaaacaacagaagaaaaaagaatataaaatgtatttatttacagtttttgcacgtggtcattatttatttcgtttattgatattttaaaatatatttgtcataatatgtaaaatgcttgagagcaattaacacaggatgcaaggtttaaataataatttgagaaaaataataaagaaatatatatatgtatactaacgtcttgtttgggttctaatcttactaaaaaattatgcaaaattctccataatactatcaaagaggaaaaatgtttgttttgtacattcaatataacggagataagatcaaacagaataaaaataaatcaatatattatgaaaaattgttaaaaagtaaacatgtataagtagacgactttacttattaattttccaagctggatgaatgatatatatacattatatcgtatgtttcttttatatttatataattattaattcttaaataaaagatcgaaggaaaattactctacatattaacataataataacatgtaatatgatcactaatgctaaagacatgtgtactaacattattcatccagagaaaatacaaatataaatagcatttgcattcccataatccttttttatgataaaaaaatcattaattgcgcgttacataaaaatagaaattaatatttaaacattcttacaattaacaataacttaacaactttgtaattacagtaggttaggtaattttatctagtactaagaataatgttttcctttttagttgttttagagtaaaacaaatagattaagtagcttttagcaaatattaaccaataaaatgttaaatacttattatttgtatatcattaattacaaatgaagatatttgataaatttttattacttatagaaaaaatggaacaatttttaacatacataagacaaaaagtttttttgtcatgttttcttcgtttataaatttttttcatgatattatttccgtataatatatacaaaagagaaggtaatacattccctttaagtttttgcataataaatatttaataattataattgagaatagatattatatatcaaaagaatataggcgttaattcttaatgctttttataatttaccgtacagatattttttagatggatttatagttaaatttgtatgttctaataacagttctaaaatagaaagtctggagtattaccaaataagaatgattattgaattttgaatagaaaagctttagtttaacatggatttttaaaggtgatctgactatggataaaaatacattaattgaaaaatgaaaaatacagaacttttggtagatctttagacatatttcttataaacaacattctatatactatttaaaaagaatataaaaattatgcggtactacttttttttttggtaaaatatggtggaatcccatatatttttatgtttgtaaatagagtgatattaaagtgttaaagaaaagaaatagagcacttagtaaaaggcaggaaataaatgaaaaaaatactcagcaaattcatataaaatatagaaaacatcaatattatatgaaccaagcaagttaattgacatgattaatatatatatatagtgctacttatatctatgatttggacattagcagcattatgtataggtaattcgagttgtttgttctgctttcttaaatgttcaattctatgtacatattgaataaaatttgtgtattattacatgatttactaatttgttagttggtttaataaaatcacatttctagatatttttatgaggaaaatacggttttttatagaataattaaaaatatcgtcttataatttcttcattaagactgaaattttaatacttttgtaaaatatttgccttttcttttttggtaagtatgtaatttcacattattttttatcaagttggaattatgacttatgaaaataactaattttaaaaacgatattctatccataagtgcacatcaaatcattcaagagccttttgttttatatttcattaaaaaaaaaaaagaaaaagagaaaagatcattcttttttactctatttgttgtgatttctaaaatttcagattgaaatgaaaaaacaaaattaaaggtaatgattccaatgttagaaaaaaatgctacaaaataatactgaaaataaatgatagaatatatattaaaatggagaaaattactaggcggctattttttacaaaataggaagtatttaccttaacacaaatgtttgttagcgtaataaactatatctaaaaaactattttttttttattttattatataaacaaaattattgttttatttttttttttttcaaattttatttatcagtttaagaaaagtataaaaggaagataaatatttttttgtggaactttattctttttttactaacctctttctcttaaaagaaatataatttatatacattttaaaactgatctattattattatataaattatattgttatttttaaataaaatggtatattttaattttgaatttaaatgtttggctaaaagttctaaaaataatgagttttaaatttttttgagtgaggatatatctttagtcattatattaacataataattactattgactagttatttttatataaaaacaatatagaatatcgtaaaactacaatatgtttttttttccaatgctatttcactgaatttgtttatttatagggtggtcggcgggtattttgtgatagttatgttgtgactattaccaaaaagtttttatgtttgatgatcttttttgagatttaacttttaaataagtatgctatttattaaactaatattttacatagatatttggcctagttatatttttataactattatctctgttttaatattttaatatgttagcttaactttctttaaagagttagcaaattttaaaaaataatagatttaaaaatagttaaaaatgattggtggtccatttttaataatttttgttacctcctcaaacatggaattttgtaaaataaaaaaaaaaattcgctaaatattgatacctatgtaatatatattaatatacgttatttatctattaaagaaattaatgtcattatgtttactatttaaatttctgtcccagtttttttgttttctttaaatgcaatattactatatatttatacatccttaatctacgataacgaaatagtatacacttatatacaatctatctaatcttatctaatccttggtttcttattcttttcttcttcttggttgctcacttatacttatgttgattatttctactttactgtatgttttataaaattttgcaaaaagtaaaattcaaaaaaacaaggattaatgatatttttctaaacgaaatctcaaacagtaatattaggaatattacatttgcttctccttatcaaacaaattctgcattgtttctaaaccaagatctttttccaccaaacttctcagataatcttaataattctttcttagacaaattttttttacttcttttctattgaattgaattagatccaattctgagcattcccccaatattcccggtagtagttcttaattatatttattccctatcatatctataattctaataatatgtcgagtttgttttgctacttcctccagtgtacattttggagcttggtaaaaatgagtgcctgtatttacgtaatatttcttcaatctaacattgaacacattatgtcttcttgagcccaatttgcctcttttgtttttgacattcagatcttcaatcatttgttccacttcaagtaatacaaaccacatacaatggaatttatgactaatatcattatttacatagacattctcacacataaacaccttatctccaggtttaaataattatagacctctatatcttttgttattattgaaaaatgacaatttcttattatcatttccataagaatttgttgagaatgagcgcctttattcattggatatatagtaaacattctcaatattatattaaacagatttagtatacaaaattataataaagttcttcgcttttttttttctatatacaacatagaaataataatatacaaagattgtaaataagataaaaataatgtatgatgaaatccttggctttatatatgttaacatttagccattttcctctacgaacaataagatatttaataaacaaactcaacaacctttggtgacctctcaacaattattactcaacaatttatcgtttagtgtctgctaaaatcttattgttctatctatttcattatagaacattttatttcaacagaattacttttaatttactttttctgtatattagtggtatacagatgtatcataatgttggtaaaacgtttaatttttcatcaaagatgtttttcagatatttgaaaaaatgaaaaaatcatatttaagataaaaaagaacaaatatttataactttatggtgtctaccattatcctgaacgctacgtattccaaaaccaacagttataatgaaatgattgtcagtcttatactttggctatcaaatcaccgaacataagaagcataacttccacatcatgagataaataacaaatataatcaaaccataaccagttaaccacattgagtcagacacaacataattagttgccatgccacttattaaccagattgttctgagattcaattgaattgttataattaatcattgaggtgttaattagtaattcactagcacttcaaattagatagttgactaagttttagaaacatattagaggacaacactttcagaagaaaatcgactttttacaacttttctctcatatatatatatacatatacatatataataacaagaataattacaacaaatagaatagctttttaggatattaactattaagaccatatagtaattgattattgactgtaataaatgctgctttcaaacaattgtaatataaatcactgttggaaaatgagagtttattactgtcattttcataagaattatttttaattagtttttctatatattatgtggtgtacggatgtacataatatcaggaaaacattttaattgtcaccaaatatgtctttcgaagatttgaaaagaaatgaaaatcttaaaagaagaatcaaagtaaataaaagaatttatactgtatacactatataataagtatgtacatgtatttagtacaaaaacaaaaaacaagtatctataacttaatgatgtctaccattaccatggacgcagaaggctccaaattccaacaattacaaatcctaattgaattaatagatcactttattcttttacctaaccagaaataaatgatgtggtatgaaataatctaaagtttagcaattattcaggaagtgcgaggaatatcaagcagataatcttataattaaaacaataattgatacaatctgatttatattcagatgttgttgtccttttatatgttttctggaactcaatcaactattcaccttgatacattaatggattggtaatccatatcttcattattagttgtaataatgtaatcgaagaacataaaacatttaggacaataggttataatggcgcagtagaaactataatgaacatggtgcagataaacataatatgttatggtggcaccgtaacaaagatgtgtgaacacgctgcatactaggtggcaaatggacacattgtacttaaaacacaacaaataactttggatttggataggatgttacataatctcagtgacattacctcattatcctaaaagatagaatgttgtattatgaagtagtgaaattctttgtgtatttcagggaagcgcaaataatattaatagttattcaagtaatcgagacagtaatcaactatagtcgatgatataattactaaaacggtcttatatattgagcggctttaacgagctaatatatttattcaaagttacttaacttgttacttgcttgttgttctctttttgttcatatataatatataaattatttacaagaaacggttatggaagatgatcttttatctccagaaaacgttgtccttttatatgttttctggagctcgatcaattattcagatttgtatattaacgagcttagtgattcaatcctaaaatttattacattaatttagtggattagaactgcaccccagttctctagtcatggtgattagtaatacacgtggaacttattaaaacaataggtaaattctagatttcccaaaatcttatgtaatctaatctttttattatgcagcatctaatgttgtagcacgtgtatggcttattaatacaataattagttctagattcattcaggatcttatgtaatcttgatggttataactattctattccacagcgtagaatgttatagtttggacttaggaccaatttttttaacagtactattgaacgaatagtaagggcaataacaaatatataagaacgttatatataactaagaggttaagggttttattgcttctttttattttttctatctatgtttatgtacaacatatagattatttacgaaaaaactgttatggaagatgatcttttatctccagaaaacgttgtccttttatatattttctggagctcgatcaattattcagatttgtatattaacgagcttagtgatccaaaccctaaaatttattacattaatttaggtgcactagtggattagaactgcaccccaattctttaatcatggtaattgttattattctattctacaacatggaacagcagcgaaggagggttggccgagtggtctaaggcggcagacttaagatctgttggacggtgtccgcgcgagttcgaacctcgcacccttcatttttacacccttaacccaagaacaccaatttttataatacctgcaatagatgaaaatcctattacgagagatatactcttctagacactaaaatagataaatatagcttagttggttgtctatatatgatgtataaattatactctacataaagagtaaactgacatatacagatatatagataaacatagttatataaacaagaaaaacaagaatgtcgccgtcgactaaagagttcataagatcatttatagtgacatcaggatttcatatgtcacaataccccagtataactatgtaataatggatttctgataacggtcggcattaaggataatagtaacaatgaatcacttggatagatataagatatacactaactccatatatttagacataatatcaatgtatatctctaatttactagcactaaaaaatagatatttatatacataatatctattcatctttatttcatctcctttcttagtttgttttggtcactttcctttacttgtgttggttactcttaattttatatgtttataaaattgtctaaaacggggaacttgcaaaaattttacaaattaaccttgttaacataaacataaagaggtaataaagaaaatgcataagcatataaagtaggagtgaccaacaaaagaagaatcgtgagtaatcaagaataaaagaaggatagacaattaagtatatacgttattattattactaattctaaattgaatattgttagaaattcataaccacccagttatcactgctggaatcaaacgttctagaataaataatagaccaattagattttaataaacattaattgataagcaaaaagtggagaacgtattgtttgcttatcagtagacgtaagcaaacttcatcataaatttggtgccgtacgtaaacgagatagaccagatatgaaaatatataaagccaacatttttttcatatcatgtttcttcccttgctcatcttctatattttagcattatacattatatacataaataaaaaaaaccgaagaactttattataattttgtatactaaatctgtttaatataatattgagaatgtttactatatatccaatgactacaggcgctcgttctcaacaattacattgattagcgtcacaaaatctattattatatttattatttattgttattctttggttgtttctccaaaacttgtgtgatttgatctcaaatagacactaactgaccttctacatcttctacgaattcaattgttggttttctgctacctaatttcctagattcacctatcttagaaagtccatccctttgacgatcccaaatggaataaaagatacctataaacctctcaatataaagagtggagtatgactaatggtgctacacataaagataacattttgtaaattttggacttattgggttccatcttgacaatataatccaagtacctaactaacatcttgtttaatctttcaatttgtcgatcaccctgagagctgtttactttggagaaatttataccgatatctaatctggacataaaatcttctaataacgaatttgttaactttttattgcaatctaagattacgaattctagaataatatactctaatacaaatttagctaaaattatttctgcaatttctagggaagaaacgcccttggacaaagatatagttacagcatatttagtcagtctctctgtaattaacataatttgttcaaagggaccatctattttcacaccactcataaaatcgatgtaaactgctttaaggcttgtgattattgtgtatattggatgaaaagcaccagttagtggctaacgagaattcttcaaggcttaataactatgacaagaattaataaactttaatacataaacttgcgtacccttctaatgataacgctaagctaatatgatctgttagcacctcaaaaatatgctatatccaaaaagtgacaaatccttaataactctaatcttaatttatatggaataaccaatctatttctaatgcctctgtaacagccgtaacacaaaaacatcttttgtagtcaatagttgatgataatagtccactaatctgcgagatattattttctccttttaaaatctcaatactaagtgccaaatgatgatcgtccttataacctacttcaatttgttttgatattgatgcttgaactgatcctattataaagattaatattttaattgtttctctgaataaattgtcagtaacacttattattcctaaaatatagatgattattaaatggagctgcattcaaaatggcacccaattctgtggtctataatttaaccaatactttttcatagtaggttctaaagacctagaatccatatataattaaaattatctaccctccaaaagatgtttccagtgtctgaaggcatgaattattgcaaacaattctttttttctgattggcctatttaattcatagttttgtaaagtcttacttaaatatgtaactaaacgaatgactttattttattttttaaccaattaatattcgttttcacaacgataaacttgtgtaaggatctaacaatagcgctaaaattcgtaatataatttctgcaataaaaatataaacatgagaattgtttaatatttttaaaagactgaggagcaagctaatttactgctttgaatacctttgacagaaaataaccatcatcataataacaaagataataattatgaactgtatccaaaattgaacaatacacctgactttcagggaaacaacaatacaaactccatacaaaactactaataagtaaatggaacgtaagttggcaaatagtgttggacatgaagaacttaatagaaatatgattaaaaatttatcgaaaattaatgagacatatgtcatgaataaacttaatcaaacattaacaacagagaagaaattagaagtcaataaacacatacttttagaggatgatcttaatacaacaaagtaggaaactaatgtctttaatatgagacaagagaaagaaaaaacagaaagaaatattgttgtcaaaccagaagtgttaaaagtagaattaaataataataaagtttttaaacttactctatgccataaagaaaaacatccataaactaaaacatcataatttgatcagcaaatcctttgaagaaataatctacatcactcaaatcaacaaatactgaattatatcagatatttaatgatgatattaaggaattcttgaaatagaaaatagaaacttaacaaaagaaggaaagagaacttgacaacaaaaagaataacttgtaacaagttcaagaacgaggaaaataattagaaattaatggtaggtaccttgttaatattaagaaggaatattaagaagatttttaaaaaggaaaagtttattcattttattacttctaaaggaagatgaaaagagttcacacctaaatcatgggggaaagaaagtgtgcttaaaagaaagatcagaatatcattttataaacaaactataactgagaattaaaatccaaaagaaaaagttaaatttattaaagcatccaataaagagttgaaaaatatagttaatatgaaagtgattgatctaaatattgccatagataaaagtaaaataccaaaggataaaatcgtaggaacaaattctatttttacgattaagagagatggaacttataaagccagaattgtttgtagaggcgatcaacaaacaagcagtagttataatgatattgaaacatccattttaagtcttgattcattgcgaattctattgattattgctaacaataagaagatgaaattaaagacgttagatattaaccatgcatttttatatgcagctttaaatgaagagttgtatatgcaacacccaaaaaatgcaacgaaggttactccattaagaaaggctttgtatggactaaaacaaagccctaaaagatggaatgaaaccttaaaagaatctgtaaatggtatgggtttatatgatgatatttactcacctggattattcgtttcaaaggatggtaatttcatgatagcagcatatgttgatgattgtataattgctactagaacagatcaaaaattagatgaatttataaatgcattgaaaaaacaattctcactaaaaatagttggtgaaatgaaagatattatgcttaatacagatattctggggatgaatttagattatgattataaaaaaggagagatagcattaagcatgactagctatataaagagattagaaaaagaatatccaatgatattaaatgataaattgaaagacgagatgattccagatattgataagtttaaaataaatcccaaacaagataatttaatcatgacgaaagatgaatgtaaaaagaaagtaagatatctacaagaattaataggcaaattgaactatattaggtctagaggaagaattgatatagaatttgcagtcagtaaaatggctcaattagttttatatcctcataaaaaggtaatcgagataacagaacagatattaaattatgtttataaaataaaagatgtgaagattgtttttaaaagagaagagattcaaaatattttgaacattacagtgcttttaggtgcttcaacaacatctgaatttgatcttaagtcaagatgtggtgctttaatatggttagagaacatttgctttcatgggtttttcaactctaaactaatattcgactggttaaaacgagattatttcaaagtaaaatccaaatacttaggataaaaaatcaaataataagatgaaattaatgaaatttagagctctcgccatccatattaatgacagacatcattaagttataaaagcctgctttctttctggattaaatattacaagtccaataactttcggtctcgatttaaaatatccttatttcggttaattcgctgcaggatttgaatttgttataatattaatatgtggatttacatatttaaatactccctttatttcacactttaataaaacaacttgatcttccccctatagtagaagtatctaatccagattaaattgatgacctatacactatagtcgattttttaaaaagtccaccatgaaaatttttgcctacccacaaaataacaccaaatcaagattttaagtcaaattcagacttcaataatacatttataattgccacaataattaaatcacttgtgttgtctctttttattgctaatccaatatctctattattgtaaaaatatttcaataatttcttcactaccttagattaccttgtgataaacaaataaaaactaattgtaatagtttgactaaatcaaattctatatatagttctcctcatgttctaatataattaaattttccaattaatactcaagtaagttattttacctttccttttaaagtggatttatccataatcagtgttttagtttttggatttatgctataactatgaatatttgaaagactggtatttttctatttttcctctccactgaaataactttttcataatttctcatagtttcctcaatataattttttatattccattgtaatattcctttttctccatcataatttaagtctaaacccaaaatatctgtttctagttgattgtttatcataaaacccagttattttaacacaaacctatttttttaatagtcatgtatttttctaagatatcttcatctttagttgcaataatataatcatcgacgtgggcagctaacacgaagaattcgcctttaaatacgaataaactaggagaatagatagaattgcaaaattctatgtaatccttaaactctttcaacaaaataattgcagttctgaaaaattttctttaaggtcatacataggtgtctttaatagtataacaactctattattctgcgaatgtagaatatgaagtcctccattcaaagcaacatataaaaatgcatgatttgtgttaaatgttcttaaaaacatcttcttagtgtttattacaattagaatggtccttaatgattacctatcgaaaattaatatttctatttcattataactcttaccattttaataacaccccctaaaactgatataggattcacaagtactatcaattttgcatataaaaacggtattattattccctttgaattccaggccaacctgaatatttaatgtattaatataatgtcctagtcgtttaatgttgtctgaaacaaatatatctttaactctttaacagatgatcttatctctctaaattagtccaatactaactagtaatgctatgtataagaattctgattcttagaatataccaaagcgttgtctaaaataacagcaacaaatttcccaatatattcacataacacacctagcataatcatctaaaatgtcaaaagtgcacttttcaaaaagaaaagcgttactcttttaatatacggactccatgtgctagtagaagctttctagtattgaacatcgatgctaaccagaatatgatagttaacacagattgaatccgacgtgaaaaacaacccttaatagtagtttaatttaattctctgaaatcacaacacaatctatgagaactattttacttacaaaccacacaggagtaccatatggagttattttaggacaaattctaccttaacgaattaatttatcaatctgtctacttacctcttattattctgaaactgaattaatgattgtattctggcttgtctaatttcccccttctttttaggtaacaacttattcatttttctaatgaaaactaaccaaatattaaggtcctgaacctctacatctactctcttaaatgaaaaactgtcaaatataatttatcttatctgaatgaaaggattagctgatttacacttatcaaaacttttctaaaccttattctagagtttagtttctgatacctgtctgcgtattgttttcatactttcaaaaggtaagatctttaagattgacgttgtctaatataaaactgagtcctccactgaccggctatataaactagactagactacagcagttttaaatgctcaaatagttcctgagattttatctgtgtctttaacctagtaagaaccatctgtctgaactatctgcaactttaatctgttcattaattcctgacaaagaactgggttatgtaccacaatcaaaatttactactacatcttgattgtcaattttcattgtttcttgtacatgtagataaatctctgaattctttttaatagttaaccatttcgtccttaacagtccttgcagtttttaaaattcggcactctcatagttctttgacttactactggcagaaaaactcttggcagttaatctgttaccagtcttacgcctatttacaaaagaatataatgtgtccatataatattttttattacaactaaaacaccgaattgacgcaacactaaatctagttttattgttgtttctaactgactttggcaaaaagttaagatacactttatcattagttgatagatcactaatagatatacctaatacacctgagtcactgacataacatccagctctatttaaataggtatgctacggaaaaatcaggttaatatcatctgttaacacaaaacttctactttctagtggcaataatacaactgaaaaggtcgtagtataaaagaaataaagaaaaactcgagaagccatgttttatgtttcagcgagagccttgaaaaactcctcaaaatctataatggaacacaaagattgtaattgcaaataaacttacacttaatttagtcgagtgtcaaatcttttacccattaagtctactaattgctcaattaaactaactgaatattcaccttctttaaatttatctaaaataacttttctcaaagttagacttgctaattcaactttatacctgaaattcagcaattcgcttttccatctagcatatgtaacatttcatccatctgtcataaaccctgagaagctggaaactaatttagttaaatacttgacgatttcataatatgcaattgatagtatctctttggctatgctgtacttagagtcttactattactaaacttggtgagctaaatcaatgaagcctaagggactaaaatactagacccttaatattggaggtagcaattaaagattcaattttgtgattactaaccacgagaatctttaactgatcagttggagtaattttattagtttgcagtacgtttaaaaactagataaatatctgaaagtgtaaataaaataactatccatgatattactagatcttttaaactagagagccatagaatgtaatagatgacgacctattacgggagaaaaactctcccagaatataaaatataagaagcagttcttggctgctgtcctttatgcacgatactaataaggtgtactgcatacaaagaaaaatatagacaaatagttgtgtacaacaaacagttataaactttataaatatgaaaaaaaaaatattgtcgtcgaaaaaaaaatttttaagatcgtctataatgacatttgaacagcgaatgttacacaaataatgatttcagcaaagtactttcaaattgcactgtaatataaactgtttggataatacacaaaagcacaagatacagtaagtagtgatagcattgctgaagtttctatgtaaatcaaacagacatatatggaaagttgagaaagaccatttattgtgttatggttcctgaggctattaaaggattgtataaaaaattttttaacacaagtgacaataccatacaagataaaagaaaaaaagaatatggtaatcttaatgaaattaggttccaaaggagaatacctagttccataaaaagatatcgtataaacagaaaatctttgaataaatgtagagtacctttgaaacagtctagagattctttattgtatacacttaacataggcaattctttgaatcattttgttaaaaatttaaaattcatcttttctaatgatgcagaaaacatcaccaatatgagggtagcatgtgagaattttagtttattatcaaataattcaaatgctattcatgatagcagttatattaatagaaataaaataatacgagaaagaattagacaaagtagatcttttaaaaaaaagttggcagaaagagattatgatcgaagacagttaaatgcattgaagagatctttactgaggaaagagaaagaccagtcttattcttatgcaagttttaacgactctgaattaaataatgacaagattctattattacaaagacaaaataaaagactgaagaaagaattactgcaacgagaatctgaactaagaatcctaaaaaaagaattaaaatttctacaaaaacatactaattttattaacagagatacaataccaagtataccaaatacaaattctaatgatattaataaaatgtataaaactaatcataatatagacaaatactatcctattgataatattatagaagaaagaagtaaatcattttctccggttcaagtcgattattcacagtattccaggtaatcaaatgatccagtaacatacgcttttcaaaaaaaaggtacataaaaacatatatcttatatgtattgtaatattaagtctttcttttctaacacccacaatttcaatggtgtatatcattgtcattatgactatcaagaatcatatatgataatgttctaacctcacgtactggtgctttattctctaaaataaaaaaaaagacattagcgtctagatctcctctcaacaaataatctttataataatttaatgccttaatcatgagtgtgataatctttggttcacttttaatagtaacaatcatttcatcacaaatatcatctattggattcctatttattacatgattcaaaattttttcattgtccttgaaattattgtcaattgttattaagtgtttgttcatactcgaactattgcctcaaattcaatcatgaactaataaaattcaatcagaatcttttaaaagattactatattttacgattcctcatgttgtaataaatgttatgtaatcactgttatacatgaacagaaaaaaaagattctttccgacacataagggtactttggtaatgatacagactaaactaaatcgtttaagtatgtgttcatataatcaaaattttgaaatatttattacttttgttatattagatgaataattatctatgttgaatgacattttcaatagttttcatctatttttttaaaaaactctaaacatagttaatgatatgtcttctaacaaagaccaacgtacatgtataacaccaaatgttgaactactaattattatctgttaaggtattaatatcaagggcactcacaaaaaaatttcactactttactttttttttgtttattttatcttcaaatatagatacctttttctaagctatgcatcacttttttatcacaaagacaattacataagaactgtaaacgatatgtgataagcaaaaatataaaactattcaaataacattagtatattcaaaagttagtttaaatgcgtggagttttcgagtaagaacgcggaaaaaaacaaacaaacgataaatcataatataccaatctatctacatttctatatatatatatgttcagctattcagccatgtatagattcaagtatcttgaaatgaatattaatgtgaagaaaaaaaagagtggagaaagaaatattaataacaaatgggaaaaggcactaaaaaaaaataaaacaaaagagaaataattcttttttaaaaatattactgcactgcaaaacgaaaatcaaattaaaatattactagcatataaactaataaaaatgctatttgtttttggttatagaaaaattattagtatgactattgtttttgttattatttacagaatagttttttttcctattttctttgcttcctccctttctttctttaattgaattatcattgtagcccaatgagctaagatatctttacaaatttggtgaaattcttctaatttataattattaacaatcactcttaataatttatgtaattttgtttttcttaaagtattcaaatcaaaaaatgggggttctgtatccagattttcgtatattttgtttagtaatttatgagactcttcgattccttcaatagttggaggttcatctctttgtatcaaatttgcttgaattctgcgtcgaaacaaagatgcaatttcagtttgtcttgatatatctaattttgaatgtgatctctttttagtggtagtagtctttgattttatatttgctataccattatgatctaatttaagtctcgaatttctatttttagttgaaaattctccaccatcttcttcacctttattatcaaatttatcattatcattatagctattactactatcattctgtttttctgttaacatttcttttgtaataaatgggtcttccccatttataagaggaccattcaggtcaatttcatcagaataatcatttaatctatcttcttgtataaattttgccgtgataaaggattctaagtcaatatattttttagcttctttataagcaatgaacaatgcatcattcatagaattggcattactattatttttcagagtagaatctattaattttggcgtcaatgccgtcagtttatgcgggaattcccagtaatatgttggatcattgaaaaaggaaacagcaattctttcaggtttttttttcttataaacgtcatttctaaggaatctttggggaaagatcacagcaggccatggtggaaaagatccaactttacaaagcaccaagtctccagttttccaattattaatattggcattaacattaacattagcatgactattattattactattgtgcttagctcttttatctttatgactggtcatgatatcaatactcaaaatcctaagaggcacacgaacattatcagattcagaaaggaccgaattactgaggcttcaaaataaaaacaaactgcacagagacagaaatttttaaaagaaaatctccctatgcaaatctctttttgtacttccttcatattttcatatctgtcttttctaacaatttcgaattttttttcttttttttttttttagcagacccaaaaaaaaaaaaaggaacaagcacagaatctcgaagattccgcatatattgcgccattattccgccacggtttatgtatcgtattcatgttatccttgttattactattatttgatattatcgctgttattatcattattattattatttaagtgaccttatgaaaatgaattaaatcaataattctgataaaggtaaaagaaaaaaaaagaaaaagaaaaagcaaaaagaaattttatcatcactaatactcttcttatctctattcttctttttgtagattagttctctgcagaatatcttggacagtcgactccaaatcaggaaattcttcactgattttctctgccaatgagtctcttaacagtttcaacccatgcatcttggccctttgatattgattcgatcttctgatagcttctacgaattctcttgtataaatatcaggatttcgtccatcctcaatgtactgaaccacttcgaatggaatactaactttttgtaaagtggactccggatcattcgagacctgatttagtttgaaaagacggtccacattacgtttcaaattagtgatcattccctgagtagcttctggcgtaccagggaaatcatatatcgatacacccaattctataaatgattctataattgctgttatttgctgttctgattgacttaactcttcatgtaatttatgtaaatcaacgtctttattcacatcattttggttggtattatctttttgcaaagtgttagtattcattgtttgccaaacgaacaaatagatctcttcacagttatcccttgtataaaccgtcttgtttaatgaaacagccaccttggttcaccaatcaaaacaatgtggcatacatatcaacgccctttttcaatgaactccagtttattcttcaatccaaaggatttcaaatagaagaaatctttccaaatgaaaaaaaaaaaatagtaaacaaataaaaaaaaaaatggaaaaatagaaaaaaaatcataaaagaaataggaacatatttatacatctatacccaaatatatatacatgtatatacaaaaatatttgtgtaaatgaaaatatagataaaatcaattagaaatatatacataagcatatacatatatataaaataaaaaataataaaaaaaaatttttttttaaataactcaactcaaatcaatcaaaaaagagaatgaaaaggaaaaaaaaaaagatgatgagatagaagagatagataaaaaaaaataacaacaaccaatcaattaataaatcaattaaaaacctaatcacttttcatatcttataataaaacacatttcttcttcttctttttatcaccgttattagattttcttgcctttccattattcttagacttccccattagggaagctcttgtagcagcctcaaagacttctctaacaccataacctgtctttgcagaacattcatagtaaccagtagcaccgatttgatcggctacagattgaccgtcagctgatgttacaggctgtaatccagcttctcttagagtctctatagtttgaggatcatttcttagatctactttacaaccaacaaggataataggtacaccttggcaaaaatgtaaaacttctgcaatccacttttcttgaacgttttccaaagaatctggcaaatcaatagaaaaacaaatcaacacaacattggaatcagggtaagataatggtcttaatctatcataatcttcttgacctgcagtatcccataaagccaattcaacacgacgaccatccacttctacatctgcaacataattttcaaaaactgttgggacataaacttcagggaattgacccttggaaaatacaatcaaaagacatgttttaccacaagcaccatcacctactataaccaattttcttctaatactgtttccaacttgttgtgacatattttattattattattattattattattattattattgatgtattgttgatttattattgctaaattaatgatataatattgcgttaatacttataaatttctaacacttctattatttgacaagtagttacaaatggagaataaaactgaatataattaaattagcagtgtttagacaaaaaaaatagaccaaaaaataaaagaaaaaagaggattaaaaaggatctaatgactaaattcaccttacaatatggaccaatccttaactattatcccttgttgtctttatttgtttattctatgtatatgttttcttcctattaatttaaagcaataaatagtacaacaaacgtcgattaataagcaaatcaatcaaagcagatagggaactaaatgtgaaacaaaatcaaagaacttcaaagggttaacacagcattaacaacaccatatctagccaatatttttgaaatcaacccaaccaagagttacaaatggttcttgtgaaagaaaaaaaaaaaaggaacaaacaaacgaacagaaaaataaaaataaaaataaaaataggaaaaaaaaagtttttatttttgtttttgtttgtgtccctagccctctatctttcgggttttacgtgttcgtgtgttgtgacacaaaatgccaataaaaaccgaagataaaaaaaatgaaaagaaattttttttgttgctcagccctcttcaggcttttagagacgaggaaattgttctaaaaataaaatgacacacaatctgctaggcagcattcaagcaatatatcttttgttatatctcacatctcaatgtacaatatacatacgtataaaagtattcctatttaataatgtcattccaattatgtgcgatcagcattcaaaaaagtatactgaacattatctgtatttttttttttttttttttgtatatttttcagatttctgctaacttactttcagccattcctttcttattatttctttcttcttctcgaacatcttttatattagaaggggttacttcagtaatagtactagtacttgcagtagttccagtaatagcagaaggtgcaagtgatgatgaattatctcccaatgtggatgtacttggaatttttgattgtatcgatttctttccatcactagcagtaattaatttagaagttggacgtcgtttcagtttagtacctaaaaatttacccgtgtgtttcaatataacgcgtatgagtgtttttcttaaaacatggattatatcaatgaatttcataacttcattctcaaacattacttttgggaatgtaaacaaaaagtctgtcacattgattagtcgtttcttaccatgcccatgatacgatatgtttaacttaaactgattaacaactaacttctcaataatcatataattcattgacctttccaccatttcatccagttcggtgtttaatccattttcttgtcgcaattgtgtaatattcactcccttattgacaaatcttgtgtcatccttttggttccactcaataaatttcttatctaagttattatcatctactgtgacatctttaccacgtaattccttcaatccgtcactaatactattaatatttaaccatgccactacctttgtgaccatctcatcctctatctggatctttaaagcagataataatacattaacattattgataactttaataccacccactggggtttcatattcccacacaatatttaccaatggattatcaattcgttctctctgtaactcattcttaacacatccttttaatgtaagtttacatgtcttcaatattttattgtgctcgtatggtctcaacaaatactcatacttagaattattttccaatgtcaaaacctccatagtctcaacatatatctgatttttcaccaatccattaatattatcggatttcttaaatatcaatttattaacattaatatcaataaaatcgtttctattattgtctaataattttaaacgaatttcattgattttaacccttagaatatgccatttatcttcatcataattagtaattttactccctgtcttcccagtctccaatacttgatacaacatatataaccttaataaatgattctttctttcgttgtgaatattagaaaaatcaatactcgatatatcatccaaagtatgtcttctaaatgaaaactctttttccaaacatgtcaatatatcataattatcataaagtaatttcaccgattcaagtatcgtttcgtaattattaaaattaaatccaatagccattttatcgatttggctatttaattctttcttttctggttcttcataattggttaaatttcgatatattttgtacaatatcgaaaaattctttgatgtaatcgttaagaaaacgcgtggcaaatggatggttaatttatcctctaatgacttcctaattttttcataattattagaaagaggtaaaagtgtttgtgattgcaccactgtagtaacatcactaattactttagcctcacttaatagatcgttttgaaaggttaactcaacacctaaccatggtggccactcagcacccttaacttgaccatacgaattcaaatcaaaaaataaggcagacttatctttatatttctttctatccaatacaaaaatgtttgcattattaacaatacaaccaaatcttttcaaaaacctctcttcataataaatattcacatcatcgttcttcggttcaaaggatatcattttattaataatatttggtgcagtaacaataatacatgaatcagggtcctcctcagtggttaactgaacttgtggaataacaaattgaataaaattgttcctatgaataattccgtcaacagtctcgggtaaatgaagaattttatcttcaagtaatttaatacaattttcggtcaaatcaaggtcatcattataattaatatcaaacgcttgatcttcatcagatttacgcttgccagaaaaggaaaaggattcgttagattctccatttattgtatttatgctatttgcagatttattgaaagttgattcatcattagtcttctcttctttttctttctcatatattttctgtttaattagatcttcaaacattctaaagctttttctagatgacaatgaggtaaatccattagctaaagttaaataatggaaaaatttcaataacacatttctaatgttttcattccactttaatagcatatgataaatataaaatctattatcaaataaactttttgatttaatggatctatcaagtatttgcatacttctaatattatatgccctaccatcctctaacgcaccatgacgtttgttgcataatgtattaaaatcatctgccaataactctaagttctttaaaccaatttgtaccctttgcaataaatttccatagttttgtttcttgtcagtatctgttgttacagacaattgtttctcaacagttgttttatattttttcaagctttgaattcttgttataatcatatttgtagttattcccatctcttcatttaaaacacaattatgtgagacagagttaataaatggtttaattggcttatatgtgactggatccaactgatatgaatcgccaaaacttgctgatttgtcatacatgaaattaggagcaaatacaaatggcctgacataaatgtatggtaagtacttgtaaatatcaacaaaaaacggttcttggaaatcagtgagatcaatccatgccatatcattatcaaatatgtcatattttgcatcttctttttcttcaatatattgcaatctgcggaatttaccatgtacggtacgaacgtcgatattattcataataattttaccttcatgaaattttaacttttttattctctttctgacacctaatgtaggattataagttgtcaaaagttccttcctttgatgtaaatccataacaaactggcctgtcttgccttttaacccaacatattcaatagagcttaaaaaattttttcttaaaacacgatctgcatcaacattatgaaccatgtatgaaataaacaaaggtctagtatctgtatgataagaaatactatatatgtgttccccgaactttggagcattgttttgaatattaaacaatttcccacgtctaacaggaaaattgcctgaaaaagttttccaccatttaaaaaaaatgtctaacgttgcaggacttagttgcatagcattataagcagaatctgttttcgataataaagtaaaagacatgtgaatgaattcacttctgaatccagcataagagtcatgttgctctaaatttgcaacatagataggattggtcaatctaatgtcataatgaggctttgaatcaaaagttctattattgaaagatgtgcttccaaccatacgttcaaaaaccattcccaagttaaagatgattccacctgttaatttaatagccgtcttttctatatatgcatccttaaaagcattgatctgcattatttcatcctttttctttcttaaatcaaacatataataatatgatgcaaatctttgcatgttagtattttcctggcttgggataaatattttattagttgaaggtttaaaccagacaagtagaggctttgcaaagaagtttggaataccaaaatacagctggtcagctgtgcatgataagaattcttttgggtcttctttcttattaacatttaacacaacatttcctccaaatcctaaaacaaaacctgcatcatccccaccaatcttatatggacttttactacctttcataacaacctcaaaatgaccaccacaaggccatgaaatttgaattcttccatgaaacaagtatctaattttatcccaaaaccctgttttttttgaagggtctaacggtggtttcgaaatattttctaagcattgcattgtttgttgaattgcaggttggtatgaaccacctacttgtacctgtgtcgtttcttttgtgtaaatattaaattttaaatcagtaaaaaatttgatactggtcacagttcttggaactttcaatgaataatattcgtctgtattttccataacaatggaaggaactaatggaacgaagattgtcctcaattcatgatctgattgaatcatatcttctgcaataattatatcacctgcaatttgcaaagtgcatttttctcgagattgactaggtaacaaaggtggaatattaataaacggcaatggataatcacgcatatgccatctaatttcagaaaaacatgcattgatattaaaaggaatcatgattgaatactttgtgtctttagggactcccttaccaacattatagataaaatttgaaatgttttccattccacaggaaggtctacatatatcaacattaatatcttccataattaatgttgataaaaagggataagtcgagaaatccaataatttttgagacacattttgtggaagtacactgtagtcgatatttccccatataaatgagaaatttttttcaaataatgctttttctttataacgaaaggattgtattctcctaatccatgatgtagatatatttgcctgaagtttgtcataatattgttcgatttcctctgttatggctcctagcaaattagtccgcctatcgttagcttttccatcaatattaaatgatgtcttgatcaacggttcattaaaagttttcttttgtccatttgcacgattatagttaagtatttgtaatcttttttttttaattacttcactaaccgtttcatctcttttagtatctatggtataaagtgttctcaacttttttaatgataaatcatcaaattcgcgtatttttactaacctctctctttgttcttgtaagcctatttggaaaatcatatttaattccgcttcaaaaggatcatccataatactcattatatacctattggattttaatttaatttttggcacagcattacctgatgtttcacttggaaaaattactagattatttttggaagtcttaaaactatataccatttgccttagagttttaattacggtagaaaaattatcaatcaatttatgaagttcaaaactgtgtggtacagacaaatgccaggattcattttgaagaagtatggatggagaagaaaaaacagctttttcataagtcatatctctttgtgcctttaattcattaatctttgtctttactaaaaacttattgatcaatataaatctttcccataaagaaggtatggttggcgattcaacacacattcttaaatattcaccagtaagttcaatattgtttatatttttaatattcataaaaaatgcaaataattcaatttttgcccttaatccatttggaaacgacagtatttgattaaatgtttctgaaccaaatgtaatgtcaagataggacgatatatctttccactttattaacctcaaacatgattttttttggctttgagcaatagccattagatattttttagccagagactcgtgattacttttaacacatgaaatacggaaaatttgatgtaatgtatgaatacccgaaattacaagaaaaatattcattaaagatagtacagacttcacttttttattgctaatttgtacaataatttttttagattggttagtttcaaatccttcaacacttggataaaccattacagataagacagacaatctagaaacagttctagcagtcaattcatttgttgaatctggtgcatcacctataaccgtacatgtgatgtcatcaactaatatattaaacgaccataaataaccgacttctgttgattcattagtagaaatatcatccaacgaatcagtatcatagtgtctatacgttgatatttctccacttttaaccataccaatatatgtattgtcatatttatttttccactgtgtataattccctgaaagagccatttccaattggttcattgtgacgcagaattttcttaatctaccatccactaaatcatgtgaactttgcgattcaattgatgaaaaaacatcaggaggcataaaaacagaccgagcccctagtaaaattttaaaactttttatgtcgatcttaaaataatcaaaaaattgaggtaaagcttgaaataaaaatgaaccagggtcaatagcttcctcttcaaaggttctacttagcaaagaacatttgtcttcagaagtttttatcttggaggcaaatttctcatataatagtttaaaatagttacgctccacatttgccatttgacaatctaattttttgacaatttgattcaacatgaccatagtgggtaattcagataaatctatatctaaaccatccaatgtacctgataatgcaatgatatgttgtggattcatcttaatatagtcttgtaaagtcaaactcttgagtctgaaaaaaatgtttttatatgacttacctctaacctgatgttgcatctgcaactctaatagttcgaaatttagatgagattcatagacaattgcatcttctttatatatgtgaatatcgttattactgattaatggaatctctttgcaatttccttcagaatcacaaagagttctgcttgaggtgccaataatcaatagagtgcaaagccgcataattattacatcttcattatcattaatgataaaacgaggttcatcaacagtaattttcatattaattaaaggtaagaaacttttgaaaaatgaaagcatgatatttctctgatatgatttggttttatcatcaccacaagtaactttaactgggtcatcaaaaacttgtttaaaaactttaatgttctttttaaatgatttcaaaaatgatagatttataatatcaatttcaaaagttggtgatgatatattaccctttaaattcaaaataccgttttcaattgtattgccataatcatgtttaaatttttgagagaaaatgttggtttcaccgaacaaatagatacttggaatttcaaggaattttactaattttctatcagcagcagattgtcttttcatacataaacaaatattaaagcgagataaagtcaaacttagttttaatggggtatcgttatctttgaaaatcaattgataaccaggcattccgggcttgaaacgagacatattaaatgttaaattggaagcacatatatggtaacttaaaaaattgttaacttctataattcttttattagtagttaaaccataatccttcataatcaatctatccatagttatattaatttcttcaatcaaagatgtaaatgtgtatatttctgttaatttttgaattatttgtaatactttcttttcaacttttaaagcaggtttacatattctattattttcagtagtatcgtccttttttaaagagttcaaaagtttcattggcaacaacaattttccaaatttcatatctaagatagtgtcattaaaagctataatggatttattagaaccctttataggttgaaagaataatttattcttcaacgttaaatataattcagtacaaacattttcattatccaaatttgcacctctaattaaaatatcaaaacaaactgttttatcttgactaattttatttgtggtagtagtggagttagtagataattttgtttcagaaaatgtaattataaaaagaagcactaccaggttaaaatttgattctttgacatatatatgattcaatgccaatctgaaatcatcaaacaaaaatttcagtatggtataatggtttgttacccactgaggtaccataatttcattaatcaatttttttgtcttgggtactatatcatcatttcccacatcaaataatttaattttaggtgcaagcttattattatcattattatgtggaagtttattgatattcaaaccactaaccacaattttcctttgtaacaaaattatttgaatatttttaacttcaataatatctttgtaaacaaacccgaatttaaattttattggattaaaatacgttatattaataccagttaagatataaagaaggtatttgagacttggtaacaggattaatattatccatagccattttggtattaaaaccaaaaatgacagaatattaaggaaatatttcatgagacagtgaattgaatatgcagttacaatttggaatatatatatatatatttgtagatatgtaggcaaaatagtaatagttaaaattttctttcttttagtttaatcccgtttgttggttttattatgttcaatagtaatatgtatagtacagagaagctactgtaattatggcatagttaaattattggtagcaaacatgcatacatatacaaatatacacacaaatatatctatatatttatatgtgtatgtatataatggcgtattacctggatataacactgagatttaaagaagtgtaaaatccgatgcagttatgacatagtacaatttattgtttgtgttaaagatagagagagagagaaaaggaaaagaaggaaaggaaaggggaaaaaaatcgaaaaggagagagagaaagagaaatttgttcttcagcacagaaatttcgaactcccgccctttccccatttttttccgatgcaagtactataacttaaatttcaggtattcttattatgattattttatattgttactattagtaaatgttcatacacagcagaaaggtcagttcttttttatcttcttgagctattccttgtacaatggcgactcttctttggactctttccattatgacaagtacattttgaaaaaaaaaaaaaacaattaaataacatatattaaatatgtcaatgtttgtataaaaagcttatatactgctcatcttataaaacacgaggaagcaaatgatgcattatacatttatctataaaatcaaatcctccggaacaacttcaatggaatatccatcaggatcccttaagaaagccaaattcttcattttaccttgattccattttggagcccatgtaatttcgtcaccataagtctcttcaatggctttacataactcagcagggtttttcaaactgatacagatgtgaccatacccttgaggtttatcattaccgttatgataatggaaatcttcatcattttcagtgccccaattatgtgttagttctatgataccttccaaagataatctgtcgtccgttggcttatgatatcctaagaaataattagtaaatttggcatttgcatgttcacttttcataagagtggtcataccaagaacgttttcataaaaattgacagatttgactggatctttgactctgatcatagtgtggttaaatctatatccggtaagatctttattagaagcattggatgtatcgtactgaactaattcaatccagtatccatcgggatctaagacaaaggcgatatttttctgtctaccatcagtcaatttctttttaaagtccacgccaatggattctaatcttttgcattcgctttcaatatcgtttgtagtgaatgcaacatgaccgtagccacgatatggttcgatattgccgttattaactttataatcaggatctgattcagtaccccagttatgggtgagttccaaagtaccttggatggagaaaggatttaggttaccgttgccatcctttggaattattttcttattattgttgttgtcatttgtgaaagtaaggaaatatagagaaaatttcatgtcagggaaatccttacgatttaatagtttcatcccaaatttttcttcatagaaggaaacactaatttttggatctttgactcttaagcatgtatgattcaacttcagaaatggatcattttgagctacttcaattactttttcaaaggacatattgttttttatttacttatgttaatattttgctatatgacttttttgtgtactctttcttatttttgttaatcaacaaatcacaaatcaattgttgtttgtatagcacgtatgtttattaatatacaaatgaatgaataaatgaaagtattttatttttataatggggaaaaaaaaaagaaagaaagaaaaacaaaaagaaaagacactaagaaaaaggcactatactaaaatggattttcaccttccctttttctccttttcccttctcttttgaagacggaaataaagctgtgtagaagtaccttctaaactccgaagaggatttttagtgtcataacgtggacgaagaaaagatacattggcatagaaatgttacgggcttcggtcgaacccaaacaatatttatatttacgtcgtatttgccgtatgcatactaatatatcacgatggacccgtaccagagatcgaagaaccagattagtgagcagtacaacttgttcttctaagatgctttttgggtacgtgatcaacagaatcctgctgtgttctcaacgtttgtgccgctgttgttgttgtaaccactatgtgtagaatataacactatttgttagtagggaagaagaagagaagaaggatattaccatcgagtctaactagaaactatatatttatgtatatagatatatatagatatgattggcggggattatatagtggaagaagttccagctatacataagataaataaataaataaataaataagttatcggttgacttagcaaagaaatccgattgtgaataaaatttgttcgataattagtatccatttttaggtagcccactataaaaaaaaaatactaatcttagtttgggtatgatgtccccaatatgttctgtacatatccagtaaatgaaatattgactaatagtcactattgaaatcccgatcttatattgaaacaacaacaaaaaaaaataaacaagagaaagtatagagaatcatatttctaaaaatatactggaattgcggggaagaaagggaggggagaataactttattgttgaatgtagtaatatatcacattcttcttaaaatgttttgataatacatcttattcttgtgtttaaatagttaagtgtaaaaagtaaatattatcttattcctatttcttttataaagtgctttacccttcacataacctgggtctttcaaagaaattgtttttagaatgtgtgaataaatctagaaacaagttttctttttatttaaatctaaggacatttaattcctttagtacttccaccaaatctggcagaataatttttgcccataaggaaattttacagaatatattgtagtaagcccgttttatctttatttatatatttattattattatttttttgaaagaaaaaaaaaaaaaaaaaaataagaaaaaaaatggaaaagctagtaaaagttattgcacataccacatattaatgaagcataaacaaagtaaagcagggtataagaaaagagccttaattttcacaagaatttttgtatttagaattactgtttttttttctttctttttttaatttcattgtagtttcctaactccagattactttataagaatagtaaatactactattaatcgattcatttaatcatatacacattttttgtagttagtatactgatatatacatatatctatatatgagtgtggacgtgtgtgataatttaatttccaatattatttaggttcctgtacacttcaaattttgttggcttctaataccagatattacaatggaagaaccaaatactatagattcaatatctctgcctatgtttccagatgagatcgtgggtaagatatatgaagaaatctcttataataaaggatcgattaaaattaataaattatgggatacttttaaaattgagaatataagtatgaagaaatttatattacaatgttgtttatccaatattgacgtcattttagttgagaatgaattgccagtcccaaataaaaacgatattgatatttctttattattggatgacactgatgggaaatactctttgaaactccaagaaaatagattatggatcattttgacaggttataacaaaaaggaatgtaaaattggtaatttagctttcgaattattattggaaatcgctaatgccaaagagaaagggattaatacaatggaattggcaagggccactagacaagatccaaggtcaattactggtagattaaaaaagatagaatatctatatcaaagtgtccaattaatctataaaggccacgtagtcaaaaaattaaccttgaacaaatttgtctcaacggaagctaatcaatctagtacaaaaaagatagaagatggttctacctatattcgtatgagagactatttggggactattgtcagtatagtgaagaaatctaaaaatggcataagacagattaatgacttaagaagagaaatgaattttgataagaataaaaggctttctaaatcattccttgcagctattaactggctttctgataaagggttcttgagaagagttttagttattccaccaaacaatcctgatgttaaagttagatgtgttcaatatcaacgtgattacgttttagaaaataataaaattggggtggattttgaagatggaagtccatctgatagcgatgatggaaaccgtgataccagtcttgggaaaaatagtaatagtagtggcagtaatggtggtaatggtgaaaatgacgatgcatatgaagatgattatgatgaaattgtatatgaaggattggataaagtcaatggtatagatctgctaacctatcaaacaataattactgatgagaaaaataaaactaaaactgtgattgaaagaaatgaaatgttgatgaatagattttatcctattcaaaaccaaacatatgatctcagtgaaaagacaggtgaaagagggttatctacaattgatgctgtaaaatatatatgtggtaaagattttcaaagggcatatgcaaaggttggggaatattttttaagtacaattgggaaaaagaatgcttctacgtctggattaaagttaattaaaatatatgattttgaaggtaaaaaaaaattttatagaactttcacagaagagaattttaataaatgttttgataaggaagtctctactgatattggtgttttaaaaccgttaaaaaaacaaaatatatcattaacctcgttagataaaaataattttcttgctattagtaacactgtaagatttggtgttaataaagatggggaagaagtatttttttggaatggtgaagatatagaaaatttaagcacaagtcgaccaaagagagtatctaaaaaaatggagaatatggaaaaattgaaaaggaaaaaagaggaagaaacaaaattaaaagaggaagaaactgctaaaagaattaaaattgaaaataaaaagatcgctgctgagaaattgctattaaaggatcaatcggaatatgcggtattatctgaacaaatcaatacagataccatcattgatccaacctttatggtatctgtatcggaacctactgaaagcgtagtcaatactatttcagttaatggatttcaagcaacctcattagcttccttgaaaagacaaaggaaacttttggaacttttgaaaagaatgggaggttttgcattcttaagggaaaaatttttcgataaattgtctaagatgttgggtttaacaaccattgttgataaaaagactattgatggtgatataagatttttatctagtactaataaggtaatattaaaaattgatagaatgttgaggaaacggtatatctatctaccggatatggactctgaaactattgaaaaattcataatggaagataaagataatagaaaaaccgggatacacgacattatttcacagagtgatatttatttctttgatgctaatgaagaaaagaaatttaacctagaatctaaagctgtaaaaaggcttcgtaaatttaaggaaaagactgctgcatctaacaagaatacgaatactaagcaaaagaagaagcagagatcaaaggaatcaagagatgatgttgtaaagtctgtatcagttaaaaaagctgcaaaggatagagttgatggcgaaatatctatcctagaaaattctggatcatcttctatgtctaaattatcctttattctaaagaaggaaacaatacctatattaattaaagctgttgttattactaaaagtattacaaaagagattcaatggcctacaatttcgtgtttgttccctaagaatagtatagggaatttaaagaaaaaatgggcaactagaagaattagaatgggaaacagtggtttaaagcttcttgtagataagtggagatcgattttagttgatggtattaaaaaggagattgttacactggaaaatgtcgagaagttacatttatctaagttattaaagttatggttagatcatgagaaggatggagatattaattctattaaactgtatcagaattacgaagataataaaaaaaaatatatacttgcaccagattctcggaatatttcagcaagaatgagtaatgtcctttcttcgatgatccaaagggaagtgttccttttgaaagaaacttataccatagaaaacccatattccactgttactaaattaaaaaaatccgaatcagaggaaaaaattaggtctgttattaggtctattttaattgataggcaaaatactgaagttcaggaaattccagctcttgataatattccgcatgaattgattgaaaaaaccttagttgaaatggctagagagaaacaaatatatttaaagggttcaaagcttagaatgactactacagtaggtgaatttttcgaaaataatgaatatacagatttgtttaaaaaaatagcaagttacacagaaaacattgaagggattttacaaggaagtaatgggattattgtaagtgatgagcctcgtgacacttctattatcagcttgattgatatttgtgaaagacgacttgtcaatatttatcaggtccctatggagaaacagaattatcgtttttactatgcgtctagaaaatttgaaatagacacgttaacaccacctttaattctgactgtgaaggacataaagatgccattttacactaaatcaaaatctgtacctgcaccactaggcgaaccatatgcacggttatgggttgatgcacaaggtagattgagggagactgtgtggaagcaatgtacttgtttcgttatatatacaattcttttccgtccaggtattaccatttccaaattgcttgaacaatgcaatcaaattctgtcgtttaatgaattatcggaaatatgtaattggctattcatgaaaggatatcttatgaagttaccttgtgatggttattgtgtttctaatgaatggcctcgtttgttactctagtgagaaatttttttttttaattattatgtatttaatagtatacaaattggaagtaaatattttcactctagcatacataatatagaaataataatatacagaaaaatgtaaataaaataaaaacctgcagtgaagaaatccgtgacatcatatatatggataataagtaatttgcttctacaaatatcgaaggacttttgggtaagaactggtattgttatcactcttcggaaaacctctaaataaattcagtagcttaaactgatcactgagtatatggttgtaccaatcctccactcagacactggaatattgcccgcaagattatgtatctattagtgttgacgcaaggcttcagaatcaaaaattctagtcgagttcattttaaactaatataataagataatgtaacttacaataggatattggtggtattataagttctattattatttatagtaggaagttagtggtactataaattgttattttattgcttagtccttttctttctatataagtaatatacaagatacaatattatacagtatactcattttatctttgaatcttctttactataaattttcataacttttaatcacttagtacgatgaatttagattatcaaacatagctctaataattatatttcaacacacccccgtaagctaaattcctgttctattttcttcatgaataaatctcggacttttataaaggcaggtcttggtaaaacttttgtcattatatcagcaatttgttcagttgtatttatgtgaccaatttcaataataccagactctacttggtgtctgatgaaatgatagtgaaggttaacatgtttcatttttgagtgtaagacagggtttttagctacgtgaatggcaggttcattgtctatccataatttaacttcgtttacatctattttcatgtgattcaacatattttttatccaaattaattccctgcttgtgttgctagcagaaatgtattctgcatcagtagatgatagacaaactgcgcttgtaattttcttggaagaccatgtaaccactccaccagcaagttttataataaacccaccagttgcatgtttcaaatcattcttatttccatgagatgcatctgagaatccttcaagatatttattggatcttgtattataagacaatcctagttttttggttttatataaatattgcataactctgtaagcaccttttaaatgcacctctctaggatctttgaggaaccgtgatagtagttgaacagagtgagctacatcaggccgtccaacgttgctaacaaatagcaactggcctacaatactttggtattcagtgatattggcaattgctggagattctgtgtcaaagtaattggctgtgttagataatggaaattccacatttttatttaagtctatttgacagctctgagcagctttggtaatatagtcctccattgagatggttatattgttcaggttatcttggtaaacattcattcccaaaaatttagaaacagggccaagatctttcatggaataagcttcgtttaaccctgctttcacagagttcataatatctttatttggagcagcaattaaaaggtcatcaacgtaaagtgcaatcaatactttaaagttgtctacatttttaaaataaataccatattctccatcatgacgagtaaatcctctcctagataatgttttatgaatatgcgtgttccatagtagtggggcttgctttaatccgtacatacccccgtaaagctgccacacgtgattgggatgcacaggatcaacaaaacctggaggttgacgaacgtaaaccggctcttccattttggaatttaagaaggcagtgtctacatccatttggtgaacacggagattaaggagagcagagatagcaagaaagatacggacagaatcataccgcaccacaggagcaaaggtttcttgatagtcgatgccagctttttgagtgtgtccttgagccactaaacgagctttaaaccgatttccgtccttaatgttaaacacccaacgagaccccaaggcacgacgaccaggagggagaggagtcaacctatatgtatcatgatctttaaaagcttgaagttctttcagacaggcttgataccatttatctttatctgatgaactcattgcctggttgaatgtatttgggacagaagtagtggtagacgtaaaggacatgccatgtaccaacgcagtcaaggctatgtgatgtgaagagttatcatcagagccagatgattgagaagaagggaataccggtgttctaatgagttgggtgagaccatccatggagttcataggaacaaaactgccggagtcaatattaacagcctcaacagcaggggtaccaattttaccaggactaattggattagaatcccactttggatggtgtttctcaatttgatgatttaagtagaattcagaagcaggaataggacctaacttgttatgattaacaattgaggatgtttggccattcaacttgctaacatgtgtggtgataggggcggaaatattgtcagctaattcaattttactattttttaatggtttatggggatctaagtcttctaagttataaaccggtgaattatcagttgataaggatttggattgtagattaggagaagatgtgtcggagtgggtatcatcaatggtagatgttaattgttgagtagttactggaacagctgttggagtagttgaagagtcagtatcagaggatgaagcaattgatgatagttcttctgcttccttcttgtttatttgattagaattatgtgaggagaatgaggcggttgactcattgtttatagaggatgaatcaaggttgttgaaagtaaaattttcacagtcagaagtcgtagaaataggagaagaagagaaggaagtagatggtagttcatattcatcagaggaagaggagtcatattcgtgcttatcattgtcagatgaatcaactcggaacataaaagaatcagaatcaacagatgatagatacggagtggagtatcgactagtaccttgatctagaacctcatcaccatgtatggtggttaattcattttctaagttgttttcatatataggataatcagtagtttcaggataataatttgacgtttgtatttcagaagatgaagttttgaaaatatcagtagatgaaggataaactgggacaccacctaaagtaccagtggcaaatgtatgagccacttcaacttctttggtacctgcaagtgggaaatcaagttcatcaaagcgaacttggtttgatacaaaaattttcttagaaggaggatgatagagacggtatgctttgtgtttggagtcatatccaacaaacacacattttacactagtaggagcaaatttcccgtcacgtaattgatgaggtaatgtagcatatgcagcacatccaaatatacgtagatgtgataaatctagattttctgtttgaatattgttccagagacagtaagggatagaataatttttattagatactggtaacctatttaagagatatacagcagtacttacagcctctgtccacatagaaggaggtaccttgcctccgattaaaaggcatcttgttttttcttcaatcgagcgatgagatctctcaactgctccattttgaaaactattgtatggaacagttaattgatgggaaattccattgcttttacagaaattatgaaatttactagacataaattcacgtccattatctgtgcgaatggcacccaccttaaatccccctcttgacttgaaatgattctcagtttctaagatccattcaatcagcttatcacatgcagctgatttcgatgctaaatgaattacggaataatatcttgagtaggcatcccggatagtcaaaaaatatttactatcagaaaaattagtatacctaaattgaccacaaatgtcaacttgtagcagctgtaaagggctcgtatattgtgtgtcagaaatttttccttttttcataaccccttttgaaagggaacaagtgggacacaacgagtgtttatcagcttccataatgggcaagtcaattcgatttgccaatcgattataattagctaaacctggatgtcctactctagcatgccatttaatggcatctggaatatttgcctttggagatggcaaaacagaatggtcatacgaaataaaagcataatcaagtggtttgttcatcgtttttgtttctttattgttgggcataaaaacataaagttgatttctcatttcaccaacttgagtaattttattatttttaattgtatatacctttgttttgtcaaatataaatttcatgtttgatttagaagaagccattttgacagaaatcaagtttacgttgccatcaggaacatatgccacattgtataatgtgacatgtcctagttgtactgtaccaatacctttaatagcagttttacctccaatgccttcgataaccccaaactcattctcatctccttcaactaactcgcaaaacattgaacggtcgtgagatatgtgctgggtacaaccagtatcaaaataccaatcgtttctcgatgttgtattttgtttgctaatcaacgcaatccaagccgtatgagaattattaatcttgtaatctttttcatgatttttatttcttttgttctttaaccattcttgaaattctggacactcattagttttatgttgtcccccgcatcttttacaattgaagtttttaactttttgcttgaattgatttcttcttccaacaaaactggagttagttactcctcttttagcattactaattacatcatacacttctctcaatttaatttcctgattcttaccgaatatatccataaatctttggtaagactcatcatataaactcattaaaaataatgaagcagctctttcacgagctttaatcttgatgactcttaaagcctcttgttgcgcagaagttaatgaatttaaaaaattttcttcactagatgtggtttcaaaaatgacctccactaaacgattaacaagatcatactggtcgtctaatgttaaattcctagctttagctaactgaaagaaaggttctgcagctacatcaatagattctgtaccaaaacactcagttaagtgatttagaagaccttttccagttgggataccgtaatcaccagcaacatatctatctgcttcttttttagcagatccttcgacattattaacaattaataattttaatgccgtttcaaataattttttaatataagcaatcatatcattagatggattatattgttcaataataacatttagctttccattttgtgcatattgataccagtgtaaattgatatcagacatatgcatagctaagatgtttatccattttttaaagttctttttcccgtccaatttaattggaatacaacctgcagctgtagctacagggctcataacctgttgacgcaaggcttcagaatcaaaaattctagtcgagttcattttaaactaatataataagataatgtaacttacaataggatattggtggtattataagttctattattatttatagtaggaagttagtggtactataaattgttattttattgcttagtccttttctttctatataagtaatatacaagatacaatattatacagtatactcattttatctttgaatcttctttactataaattttcataacttttaatcacttagtacgatgaatttagattatcaaacatagctctaataattatatttcaacaattagattttaggaaagtttcttacataaacaattatttatagtatattttaatcggtaaatatgcggtccagaatgtatgtttttggtcttgtttatgttattctgtcaaaatataagttagagatattctggacaacttaaatctaccacaccaaatggtagagaaagttccaaagacttctattaaaaaagacttaaataaacagcaggtctaactatatattataccttctctgttagttatgaagactgggtaaaatcaagcaatataagttagagttataatagcactaacaatctagtataaatatgttgagagcctataacaccactaatattctattacaaatccatagcatttcattgtattgattttataaaaatttctaataaagattttgaaactgaaataatacctctcaatcagatgttatacatatctaaatgaattattgaaaatattatctttaatcaactattattagaaacgcatagcctaaggattattacacatgctaccaaaaggttgcaaaaaagaagctccgatgcggggagtcgaaccccggtctccacggtgaaagcgtgatgtgatagccgttacactacatcggaaagaaccacttgttcgtcgttgtagatcaacctttgtattatgattatatagaaaaaacgattagggttgaaaaatattgttagggttttgtgatggttgtcaagaaaagttctagtttggattaataggacttagggtttgttgataaatcccatgtgactgttgaataatatgtaacaaaatgaaacattcatgaaacattaaatagctaattaatgagtgaagagttgtatatacaacatccaaaaaatgcaagaaaggttactccattaagaaaggctttgtatggactaaaacaaagccctaaaagatggaatgaaaccttaaaatagtctatgaatggtatgggtctatatgataatatttactcacctggattattcgtttcaaaggatggtaatttaatgatagcagcatatgttgatgattgtataattgctgctagaacagatcaagaattagatgaatttataaatacattggaaaaacaattctcaataaaaatagttggtggaatgaaaaataatatgcttaatacagatattttgggaatggatttgaattatgattatgaaaaaggggagatagcattaagcatgactagctatataaagagattagaaaaggaatatccaatgatattaaatgataagttaaaagaagaaatgattccagatattgataagtttaaaataaatccaaaacaagataaattaattatgactaaaaaggaatacaagaagaaagtaagatatttacaagagttaatcggtaaattaaattatattaggtctagaggaagaattgatatagaatgtgcagtaagtaaaatggctcgattagttttatatcctcataaaaaggtaattgagttaacagaacaaatactaaaatatgtttataaaacacaaggtacaaagactgtttttaaaagagaagaagtagaaaatatatcaaacatcacggtgatttcagatacttcgctagcatctgaatttgatcttaaatcaagatgtggtgcattaatatggttaggaaacaattttttccatggattttcaaaaaaatcatcaattttatgtacatcatcagcagaagctgaattagatgccataaatcaggctgagaaaattgcattgctattaaaattgaaattagaaaagatgatggattttaaaaacataagaatatgtgtaattactgacttcaaaccagcattggactggttaaaacaagattattttaaagcaagaaccaaatttttaggactaagaattgaaagattaaaagaaagaatattagattcagacttaagtctaagaaaaatcagtggaaaagaaaatcctgcagatccattaacaaaatccactactgataaagatataaataaattaagaatgattgtacaacatgaattaacacccaaagagttgcttccaatcactgtcctctggaatgctggtaatggaaatcattaagttatagtgaacaggaggaaattataagaaaaaccaattaaaggggcatgttggaaaatgagagtttattactgtcattttcataagaattatttttaattagtttttctatatattatgtggtgtacggatgtacataatatcaggaaaacattttaattgtcaccaaatatgtctttcgaagatttgaaaagaaatgaaaaactttaaaagaaaacttaaagtaaataaaagaatgtatactgaatacactatataataaatatgtacaggtatttaatacaaaaacataacaagtatctataacttaatgatgtctatcattaccacggatgcagaaggctccaatttccaacaaaaacaaaacaagcatccataatttaatgatgtctacctttaccatggacgctgagagctccaaattccaacacatatctttattattagttacaataatataatcgaaggtcatagaacatttaggacactaggttatgctggcgtagtagaaactataatgaacacggtgtgcataaacataatatgttatggtgacgcagtaacaatatctaaacacgctgtacaaaacaggtggcaaatggacatgttgtactcgaaacacaatagataactttagattcatagaatcttacgtaatctcgatagtgttacctctttattatacagcatcttctgttgtagtatggtatggtgaagttctttgtgtattccagggaagcgcaaataatattaatagtaattcaaataatcgagacagtaatcaactatagtcgatagtataattactaaaacggtcttatatattaagtggcttatatcgagctaatgtacttattcgaagttacttgacttgttacttgcttgttctattttgtttatacataatatataaattatttacaagaaacgattatggaagatgatcttttatctcctgaaaacgttgtccttttatatgttttctggagctcgatcgattattcagattactacattaatgacttgactgattcaaaccctaaaatttattatattaatttaggtgcactactggattagaactgcatcccaattctctaatcatggtgattagtaatacacgtgggacttaataaaacaataggtaaattctagatttgccaagatcttatgtaatccaatctttttattatgcagcatctaatgttgtagcacatgtatggcttattaatacactaattggttctagattcattcaggatcttatgtaatcttgatggttataactattctattccacaacatcttcccgaagaactcgtccttgttagctcagttgatagagcgttcggcttttaaacatttgtttaagcaagggtcaccgaaatgtcaggggttcgagccccctatgaggagttctttttaaatttatgataaccctgatattactgtttagggtttgtttggaaaaatgagagttgatggtatttttctaaactttctttttttgaaaattttacaaacatagataaaaacaggagtaatcaacataagtacaagagagcaaccaagaacgaataacaataaagcaagcaaagaacaaggaactgaggattacctaggtttagatatatagtatataagtgtatactattaggctatcttagattagggatatagatatatagatatataggaatattacatttagggatatagaaagagcttatatcttatacctatctaagtgaagtattattgtgttttcaacatgattgactgttatcagaaacacatagcctaagggttattacattattgcacacgctaccaaaaggttgcaaaaaaagatactccgatgcggggagtcgaaccccggtctccacggtgaaagcgtgatgtgatagccgttacactacatcggaaagaaccacttgttcgctgctgtagtttggacttaggaccaatttttttaacagtactattgaacgaatagtaagggcaataacaaatatataggaacgttatatataactaggagggttaagggtttattgcttgtttttttttgtattatacaatgtgctacatataattataaatcaaccaaacatataaatttagataccaagatactggtcctttatatgtgaactatgggttgatagtttcttatttgaggttctgtaacgattgtcaccatagatacatttctcattgttggaatttggagccttctgcgtccatggtaatggtagacatcattaagttatagatacttgttatgtttttgtattaaatacctgtacatatttattatatagtgtattcagtatacattcttttatttactttaagttttcttttaaagtttttcatttcttttcaaatcttcgaaagacatatttggtgacaattaaaatgttttcctgatattatgtacatccgtacaccacataatatatagaaaaactaattaaaaataattcttatgaaaatgacagtaataaactctcattttctgacaattataattagatagacttagtatacaaaattataataaacttcttcggttttttttatttatgtatataatgtataatgctaaaatatagaagatgagcaagggaagaaacatgatatgaaaaaaatgttggctttatatattttcatatctggtctatctcgtttacgtacgacaccaaatttatgatgaagtttgtttacgtctactgataagcaaacaatacgttttccactttttgcttatcaattaacgtttaccaaaatctagttggtctattatttattctagaaagttcgagttcagtaagaagaacaaaacatagttatatagagtaattaaagaaaaattataaaagttagtttttattttgtcttattctactctgtcttttttattttaatattttgtgttctttattttctattttttcaaaaatctcttttttagattttttagtaatgagcaaagctcaaccagaaaaaaaaagattacacttacaaaataaacaattacaatataaggaatccaactgaaacccagtaattgtacaaatttacagacaatatacatgttgaaatagaatgttctataataaaatagataaaacaataagattttagcagacactaaacgataaattgttgagtaataattgttgagaggtcaccaaaggttgtcgagtttgtttattaaatatcttactgttcgtagaggaaagtggctaaatgttaacatatataaagccaaggatttcatcatacattatttttatcttatttacaatctttgtatattattatttctatgttgtatatagagaaagaaagtgaagaactttattataattctgtatactaaatctgtttaatataatattgagaatgtttactatatatccaatgaataaaggcgctcattctcaacaatacaatatatagataatgttgagatattacccagcatcaatgaaaattttgtggaaaaggtttttacaaaagtaaccttcgaaaaagtataaataatcaaaatatagaaattaagaataatttcttttacccatcactttatatacacagtacatagtcttgtatataactcttgtgtcatttaattcaatgtacgataaaatacacggtttataatgtttcattatagcatatagattattactccacgccttataaatcttaacagatgagttattaatacaattatgtactcaatgattaatataaactggtaaatttgattggaagttttccaagagataattattttttttaaataaattccagtaccaatattaaggaataactcttaattttatacaaaatcaccagcattaataaaattaagttaataatactatatcaagtgctatgcaactttgtacactatttacataaaaatatttgtacttatcctacttaattcaattcatctatttacctaataacaattttcatataatagtattgtttaaagattactaaaaagtgactttttcaagtgggcgtttttttttctcataatgaataatgatactatacaaattcttacaaagtattcacaatctataacagggacaactacatataaaaaaatcattattgatatttctttagaagttttaactattagaaatatcaaacgactatataaaaaaatttttaatgttatttaaaaaaaacaacaacaaccgttatcaaacacgatactgttgaaagtgataaaaaaaatagtatttaagggatatataaaaagtaaattattcaaccccaaaagtgaaatcataggttaagacaagaaaataataaaactcacttttatattttctctctaattattctatataactatgttttgttcttctacactcctatctgttacttcacatcacaaaatactgaaaaactggaattatgatatacacacaaataacattagtattcaactatgtccactaatttaaataacaacttaagtctactttcttataaacactgtttttactaaaataatatctcctgtgcttttgtgcagttcccttctcttagcatcatcatttatttaatgtacaccatattaaaaatttagaattgaagttaatattcatttatgacattaccaaaaaaacttgcttaaaaagcaaattaacatgctttatggggcctacataataaagaaagcacttttatgtttttgttatgttttccatttatccatccacctataatatattcataatttatcaggaaagacattggataaaccgaagaagtgtattctcgaataccgatgcctaccattaaataccattaatccatgttcttgggttagtttccttgcaatatattgcaaaaacagattttttggtagcggattctcaacacggaaaattttccattattattccgtacacccttttccaaatgctgctgttgaaggaacatcgagaaacgaaaaaaaaaaaaacaaacaaacagaacgaaagaaataaacgagtattatataacaataaatgaagcgaagaggagaagttcttcattacttctaccacctctgcttcaacaccttagtgaaaccttattgcaatttgaattataaaaaacacatatcaattaatatattactttaatagaggacaagccacatatcttgataataacctctcaactcattgaagagcattctggctgtcaaggattttttattagaactgtcccgaaacactttatcggttatctctttaattttttacttaatttcctatcactatttattcttccctatataatttccccttctcctctaggaatcctgtcaaaacatgtctacatcaactggaataaatcaatcgttacattcaccgacaccaaggtatgctcgaagtcgaagatcttcttctgttgggaagatcgacttaggtgataatgttcaatcaataacaagccaacttggttcaaaaagcacaaataaaagctcctataattcgttacaattatgtttacaacatcccttaaaatatattggtgaattaatatctcgccatgtgtggataccacctttattcatcattagtgttgtgtatgccttctacttcagttctgataaccaaacaaagacaaatccattacatatgtttgtgaccatctcttatcaaatagatgatactgatatgtatggtaaaggtatcaaagatctttgttttgtattcttttatatgattttttttactttcttaagagattttataatggatgttttcattcgtccctttgcattaaaagttgccaaaaataaacaaaaacaagatagaattatggagcaagtatactatgtattttactacggtatctctggtccatttggtctatatatcatgcacggtactgatctgtggcttttcaaaactagaaccatgtacgagacttatccagattttaataatccctatctattcaaaatattttatttaggtcaagctgcattttggactcaacaagcctgtgttcttgctttacaattagagaaaccaagaaaggattattatgaattgattttccatcatattgtgactttattactaatttggttatcctatgtgttccatttcaccaagatgggtctagccatctatatcaccatggatgtctctgattgtctattagctttatcaaagactttaaattatttagattccccattcactcctaccatctttatcattttcattattagttggatctatttgcgtcatgtggtcaatattcgtattctatggtctgtgttgaccgagtttagaactgtgggtaactatagattaaattttgccactcaacaatacaaatgttggatttctttaatctttgtgtttgtattaatccttgctttgcaattagtcaatttgtactggttatttttgatcttccgtattctttatagatatatctctagtggtgttcaagctgatgaaagaagtgaaaatgaggatgaagaagaattcaaagaaaagaaaaattgataaataaaagaagaaaaaataaaaataaaataaattgaattatctggaattccatgactttttaacggagagacagttcaattttataacataactgaaaaagttataactatttcttttacttatatcccttctttttctctcattccaacctttttcttcatacaacaaccactttgaaatctttttatttgaaataataaatatgatgaggtgtaccaagatttttttttaggaaaacccaatctatttatttacaagaatgtagatatcaacatatctccatatataaacatatatacatcatatgcactattgttattatcagtaataatataatttgttctttttttcaaatatatcatatcatattgtagcatcatcactattctttcctttcatcatattttttttcaatcttttattcaatcctctttcaccagcccttgaaagtatacctaatagtagattaacagatctattagaatcatcattaccaggaattggataagtgaccattgatggttccgaatcagtgtcaatgataccgatagtaggaaccctcgttttcattgcttcgtataaagcgtttctattttcagtaggattcaaaacaatcaacaaatctggcttaacaatacatgacatttcatcattagtcaaagtcctgccagtaggaacatcgaattgatcgatttcttgtttatcccatatacgtgacaattcagttggattagtgagagttcccggaatccatctggtagaaacaaaataaccattcattcttcttgcagctgtttgtaatgggactttccactgaggtcttgtgcctaacagtaagatgataccaccattctctgctaccccctctacaatagaacatgcccttttcaaatattgcaaagtttgattcaagtcgattatatgtaagcctttatattcaccatagatgaaactttgtgtagaggatctatacagagaagttgattgacccagatggacgttagcagccatcaatttttgtatagtggtctcctctacagaaggtggacatgttatatccatgtgaggttggtaggtgtctttaatttgggcacccaaagaagctgatacccttgcatggttcaattgtcttaaatataattcttgtaaagaatatggttcgtttgatttagaaactgattttagataggggaaaggagtggtagtagatgcagtcgtagaagaagtggtaaaaggacctgttagagacctgttggtgttgttattattagcaaggacttgctgttgttgttcctttaaatgtttaaattcctccaaaaactttgtcaattcttcgtctaattgtaattccttatcatttaatggttgattaagtaaatttctaatattttgttcttcatcagtattaacgtatctcagtgatttaagtctattaacaatactctcatttgtcaaagtattctcgctgtttattgatgaaacatgattgaatcttttagataaggtagaaggatataatttattaaacggtcttgctgatactaatttcaacatattttctattgtatatatctatagcacacacatacacatctatatacataaatacaagtaaatatatacatacatacatacatatatatgtacgtataaacttgcgataaaaaaatgaaataataaaaaaaatcagagaaaacttagaaataaacaattgttaacgtcttgtattctataacattagtacctccccccatgcatatgcaaacatgaagcacatgcaattacaggtatatgccaagtagcgcttgttctctcaattttgaaccacgcctcttgatccctatctgttaatatatattatatttcgaagtcttgtaaacaattattgtatgtttttggatttctggatttttgagacattgaaaaaattcaataaaacaaaagggaaaacatcatcaccaacgaacacaaacccatacacccaacatttaaaatgtctgggtttttctgggccagagaagtttttcttttttttctttttttttttttttttggatttggaattttgttacgtaattttcggtttctgtgtggagtggccccagtagaataaatgagcacacacacactcacaaatacatacacgcatctatgtatatgtatatgtatatgtatatgtgtttgtatatgtatatgtatatgtgtttgtatatgtatatgtatatgtgtttgtatatgtatatgtatatgtgtttgtatatgtatttgtatttgtatttgtatatgtgtgtgagtaggttgcttaagtgatatatcaagtgagaaattcatatttttaataaagtttttttgtgtataaggaacaagtaaactttcatacatgaatatatataggtagatactattatatgggaagatataaaattaacgctttgaatgtgcttttgttatactgacaatagcaacataactatacaatcagttataattgatttaataaaacagaaagattccagatacgatgaaaagacttataacaacaataaaaccagcggcagtaacaccagcaccattaattatgcaccgagtctaattattgttcttggtgacaaatcacgtcaatttattgaaactgaattaaaaaaactattaacaaaacgggctgaatcttcttctgacgatgaccatctgttaactattaatgatatacgacgtttagataaggatattaaaatcttgtttttaaataaattacaataccttttcatgtatttgacttaccttgaagtcgatagcgatctaaattcaaataagttccaatacaacaatataataatttttggactagatgaacaaatgtcgaaagtccaaaacgctagtggtaagattgaaatgattaaactataccaattaatattaaacagtttttattcattgaaacataaatttgatactataaataaattgttgatagtatcatataataacaacacgaaggaagaaaacggtagcgacgttgatgataatgactacataagttttaaaaacattgaattacaaatcaataattattgcaaatatattaatggacaataagaaataatcaaaagaaaataaataggaaagaaaaaaaaaaataaaaatgatacatctattttattgaatcttttttttttttttaattattttagtgtacaacagtatataacacatatatatttacctaattggaaagattaagattaacatcaacctcttttatcccagcatttgcgatatcgtaataccattgaattttaattctaaatttagattcggccacaccgaattgcttcaatatcaaactttgtctaacatccaatttctgaccctttgagcaaactttatatggttgatcaaggaaaatcttacccttcacgatcttagtcgggatctcgaacttgtttcttaaagtgggttccaaagaatggaccatggggacatcgtcttcgattggaatctgtccgcctcgagaatacacgattccctggggtataacaaagtctataggagacaaactaccagccctggaatagtcattcttttcgtatgcagtaaaatagtccttaacggtagcgacatcctcattggtgaaaagcagacccaccacaccgttgatatggtttgatagcttgtataagttttccttgtattcattttcgcgagtctcaccgagagcttttattaacactttacgcttccccataatcaaacgggatcctacccattgagacctgatctcttgcaagactggagtccttacgtcatccagctgtaacacccagacgtactggaaagtgtctaaggcttctcttactgaatcgaatattttttccttagattcacgggtcttagcttcagttttagatagtgtgactaatttagaacgtttggaccttggcatggtacgagtataatatgcgtattataatatgcgtatatgtgtaatggtttaaactcttctacctctagaatgggaacaaacgaagagagagctaaagggaccaaagcgatggagaaagagatggacagagaaacagacagagactgagagataaatgcctaagaaagagagtcaattgtgtgtataaaacaaattgaataagagctgaaccaccagatgtacttaaacagacctgagatagcaccaacaataaaaccaataggcagatcagactgactacacttaatcaatcaaatccatattacataacttcacctcattgcatcgagttgaacaaatcttccaggaaatttccacagaaaaatttttccactcagaaaaagaaacgacacgggaaaaatagtagacacccacacacccgaatattctacatcactttccacgaatcgagggaaaacgggaaaaaatgaaaaacaaaaacaaaaaaaaaatgctgtggggttttgtcagcgaacttgaaacaagttaaaaggtaaacaatgtaacgtcttccatatcataaagtggtgataacaacagatacacctgtattatatctacccctgctgaacaagacgtatatatgcgcaatagattggtatattagtatgctttgaattggcattgaacatagaatactacaattaccttcttttttctctttttttttgtttttttccttaatatagaaaacactgacatacaaaaaagtatacatttattactgaaataactatgacagataataagactggtagtgataatcccaatagtgaaaataaaaataataatactgatacccataatagtagttctatgccagatagtgatattcccagagccctcggggtttggaacattaatgctttaacaaatgatataaataagtcagatccttctactacaaatatagcaagttcaaatgttttcgaaaccacaaataacagtactggatcctccccaaatttaaataaatgtaatcataatagcaacaataacaataataatattcaaaataatggagagaaagtttctactacatctaaaaatcaaatcaagaacaaaaaaatatctttaagtgggaataacaatactttaccatcctcatcagcttacaaccacaaccacaaccacaacaacactaacaaaagtaatagtaatagcactactggcaaaagtaggagtaatagaagtagtggcagcaacattaacaataaaaataatataagtaatagtatcggctatagtagtaacaacagtagtagtaccagtattatgaaaggtgtgtttgcatccttaatcaaaagaaatagtggggacagtacgaatagtagcactaacgggagtagttattcctcctcctcaacaactacatcattaacagcaacagcgagaagaaggagaagaaaaagtgctggcaacaaacataatagtaccggttctctgaaaatatcaactccatataaccccaaacatctacatcatgtggggatagatgctaaaactggcaaatacaccggtcttccagaggaatggcaacgtctcctggcttcaaatgggatatctaaacaagaacaacaacaaaatatagagactgtgatggatattgtccagttctatcaaaacgatgtatctcatcccggggataaaattatgaaaacttataaacccaaatcagtaacaccagtctctaacacacaacccgtatctaattcttccaccccaagattaccaagtactggctcttataaatcttccatatcaaattcatcatcttctactccatctttaccaactctcaataatagtcacaaccatagccataaccataatcatactgcttacagtcctatgtccacccctcccttacattcaaatattgtaaataatgaaaaatttattccaacaaggcccgcgccaaaacctccaactgttaaaaaagcaaatatcaactctcaaccatcatctccctccatctcaaataataacaaccacaaagctacttttgtaaaatcaaacactcaaacagacctatcaaatcaccaagaacaaagctcacaaaaagaattaccacctataccaacgttacctacaaagaatgaactagataagataaatacctcttcgccaacacgcactcaattatcaaatgaacggaaacgtgaagaaagagaaaaacgcaaaaaagaaatttataacaagttacaacagatctgttcattagatgatccacatacaaaatatgtcgacctgataaaaatcggccagggggcctcaggtggtgtttatacagcacatgaaatcaatacaaatgtgtcagtagctataaaacagatgaatctagaaaaacaaccaaagaaagaattaatcattaatgaaatcatagtcatgaaagagagtaaacaccccaacattgtcaattttatcgactcatatctaattaaacaagatctatgggtggttatggaatatatggaaggtggttcactaacagatgtagtgacacattgtatattaaatgaatcacaaatcgccactgtatgtagagagacattgaatggattgaagtttttgcactcgaaaggggttatccatagagacattaaatcggataatatacttttatcaatggaaggtgatattaagttaacagattttggcttctgtgctcaaattaacgaatcgaacttgaagagaacaactatggtaggaactccatattggatggcaccagaagtcgtctcaaggaaagcatacggtccaaaagtcgatgtttggtccttagggattatgatcattgaaatgattgaaggagaaccaccatatctgaatgaaacaccattaagagctttatatttaattgccacaaacggaacaccaaaattaaaggaaccagaattattatcaccacttttgaaagatttccttggtttatgtcttaaagtaaattctgatcaaagagctactgcagaagatttattaaatgatccatttatcaaacaagaagctgcatctacatcaactttagctccattggtaaaactagcccgcatgaaaaaattgtctgataatatggatgataatagtaacccagctactagcaatagtcaagaaaacttaattgctgataataataataataatgagacagttcaataatattttcataacaaaacacagttgataaaccgagagagtaaaatggattgaccattttcaaaataaacatatagagacttacgttaaatacacacacatatgcaaatatatatatatatttatgatatttttcttatagaataaaaccagatccttttttattttttatttcctactagatttttacatacttttattttttttgtaaacacttaaagatcaacataggtattacactatctattcaaaaaaaacttctcttttacttaactgtcacttgaacaaaatgtagtttaacagcgatattccccttattaactaatgaatatgagttataagagggaatctggaatgtggatcctttcatacagacaaacttattgttatcagatattgttacttctacacaacccttcaatacatggaagattatatagatattatcaattgttgagagtgttttttgaccattgataggtaatgtcatgaatccacttgcaaaataatctttttgtgaatcaaataaaatatttattttataattattattattttgatagtacatcctttcattatcaatataatctggtgctatagccagaatctcctttttagattctaatttatcctctgtaattgatttctcttttatagtaccttcaaatacacctctagatacccattcaatatctttatttccagagcttgatatcttcttctgtattttactatttaaataagaataatctacttttatctgttttcttctttgcgaattgttttctactggagaaagaaactgattcctatcgtaagattcgttatcaactgtaactccattccttttcttattccttgtgtctttcttctgattaatactatcattattttcattttcataagttattattttgaagatatccaattcaggtcttgcagatcttcttttatagacaatcttttcatttctccaataatcaagaataggaactttaatccgtgtacttctccttaaggggacgttcgattctgctagtttgcaatcttcattttttattggaatataatcactatcttctccatcagagtcaatatcactacaggtatcggtatttttgacttttttgttatgaactcttgatgcaatctcagtttccaatagggcatcttgtgacgtgtccaatagaacgctttcttctgctgtactatagtctaattcagaattgtctaatagatcaggtacattttctaaaatttgattttcattttcctcctcctcttcatcctctacttcgattatttctggaatattataatttgattgaaagtcttttacatctaggtttgatttgacctgaaaggaatttttattatatagtggggtagcaacaatattttgtgattcaacgtcatcaattaaaagaggaatgttgcctcttggaacatcattaaacttatctggtgaaataataataccaattttcaacggtgacaaaatggaaagattactcttatcaaaaatgctattatccttacttttaggcctcttagtttgatcactaacatgtggactttcatttttttcttcattaaaatattcattgatattctccattaaatatttatctctttcacatgacttattcaatcgaaaccccgtttttctagattttgaacccagcaacatataatccatggtaaacttatctagaatttatcttataaaaataactaagtataccataggcttgtttttttaatttattccgttaacaatgttttacattgacgtatatttgtgcatacacttatactcactctcttcttctttactttcaatgtttaacagcaataagtgctaccatacaaccaaaaacaaatctagattaaaataatcgaattactatctcatgttcttagcagatgtagctgccctaccaaacatgaacactcatatacatactctctagaaaaatatattaattcatctgctctgcttgaaactttagatctaaaaaatcttctcgaaggctcttgaaatcaaaatttttttggcttcttttctctctcgagacccaaacggcactaccacaatcctttaaacagctgaaggggtaaatataattccacaaagaaaaatataaagagggaagggaagaaagagatctctttaatgattaaacatgtcgatctattcggttcttcagattctttcgtgccatctgtctcacactatctctctacatttagttcctatttcaaacatatcttattgcaacttgttaaaagttatatggtttaataaagatagtcattattagatcaaaatttagaaaaagggaggaagaagaaggagaaataataaggaatgacaaacgcatgaagattaaaagtatatttatgtgtacatatatgttttgccttatttttgttgtttagaaataaaaaaatcatatacagtccataagcaaacaaacaaactgatattcaatttaacatgagtctaataccttactcagatgattcattgatactcaatgacccaaactccaaatccttgatgattgttaatgctgcacagggtaccttatctgtattccaagaagttcctaccacacatcctttagttaataattcagatagaagatctttatctagttttgatcatagtaatcagttggaaagatataataccatatattttgaagataatattcgtaatagtaattctaatactactaacaataataataatattacaggtaaaaatagacattattctatagcaacatttttatgtccacaatgtggcacaaaaatatcagatgggaataagattaaagtttctcgcaacaatcatacaagaagatcgcctctccaatctttgagtgatacaaattataatagtgcaaatgacttaacggataacttcatcacaaatgccagtctaactgatactcaaggaatgggacctttgaattctaaccaatcacctcatttcaatttatctccaggatattttcaatttttacaaagtacacataggcaatattcattgccaagcattaatgatgattctaaatctagtaccaacagcaactatattaaaagtagtaaaaataaaacaaaaaactcacaaaaagagcaggattttcattcctttataccggaagatctttttatacctggctatttccataaattttttacaaccttatctttattaggtaatggtgctcgtggttcagtgtttaaagtgattcatagaattggtaatacaccacttggtgtctttgccttaaaaaaaatctctattggtaatgatatggtttggtttaataaatgtatcagagaagtgaaagcattgagttctctgacacataaaagtgccaatctaatcacatacaaccatgtttggttagaaatggataaatcatatggtgttacaaccaaaatgaacactaataaagaacaattaaatcaagattcaataaatgatgataaaaatgatgattcaaatgaaaagattccatgtctattcattttacaacaatattgccctggaggaaatttagaagattgtatttcaattgatgttttcaaaaaataccctgaaagaacatctcctgaagaaaggaaaaaatggttcaaagagatgagaagaattaagagagctaatgcacaacttcaattaggattatcgacattacaaatcctacatattattcaagatatttcaagaggattacatgagttacatgatattggtttgattcacagagacctcaagccatccaattgtttattgttgtctaaatataaagacaggacagttgcagaagatagtaaaaacgacataattcagaataacgattcgataactaataattttgacatcgaagaggatcatttaaataaaatgaattcattaaatgaagaggaatatgacactttccctactgtgataatcggtgatctaggtgagagtcagcttctcggagaagcaagaaccgctactggggcaacaggcactatagaatatactgcaccagaagttattattagtgataaattaagtcagggagtagcaagtaattccccgatagacaacgatatatcattgccatacaatgaatatacttttgcttcagatatgtattctttcggtatgataatatattttatcatatttggtaaattgccgtttatattagattcatttgatatacctgacatgaaacgtacggtcaagtcattcaaaattaataaattatctatgattaaggaacatagtgctatgaacttaaaaccaattgattctagaatatttaatataatagaatcattgctgtctactaatccagccaagagacccactgcaagacaactagaggaatatgttggtcgtttaatacttactctgagtgaaacaaattcggataataacgccaatattagtaaaaccaataataattataataataatgttaatccaactgaaccatcaaacttcaaggaaacaaaggaccttcaggtattccgtgttgaaaacaatatatattccgatgcagatgaagtaacatctgttgaatcatctatgtcagatatagaaaatattgttgctcgcgatcggagagataatccttttgatttgcaaaataattcaccaagtgataaaacagaatatttggcattgattaatagtcatcaagcaaccaatctatcacccctgtttgcttttacttacaatgaatattgccaaaaggtattctattcatcatatttatatacaacaatctcaatcttgatttctgctttaatttatttcgaaataaaaaaaaaggtctacttatcactattaaatttactatcaatgttcttattaggtctttctgtcaatagtggttacgaggaggcaaaaatgataacaattatcttaatgcttttatacgttatattaaaagttttctaattaacaattaatgataccatccaacttatataaatcaaatatctaagtactacatttagatactataaaaaaaaagtaaataagaacaaaaagcactgaattaatcagtaatgtttattcaataataataaattggataacgtaaaaaaaaaactacttctccaccattctacaccatggtcttccatcttgaacctggtggtcacagagagttggctctagcagtagtcctactaaggaagctaaaaatatgcctagtgaatcagcaattgagactgagcccatagagaattcaatttgttcatgaggtaaatcatcctgaacatttagaaaagtgttaacataggatgacccaccgagtaaaccttcccaaaagatcactaacatatttaaatacggccatcttgaatttataaaataccaagattgtaataacgttattatgaaatttaaactttgtagatatgtcaatgtatataatttttttaatcttatccacctacctgatgatcttgcaatgaaaacaccgacttgatataaggtactataaaggacatacaaatccctatacctatgaaaaaatgggattacttctactgggaatagcaaagttggtgaaatcgattggttaattaaatactcaaagaaatacactgaagttaagggtaacatatatggtatgattagcattttcaatcgtgaccaaacactaaaattatttactatccattgatttgtagacatattagataaattcacagacgattgtggttccaaattgagttgaaaataaagtaaaaatccaataggtaaaactgcaaaacataatagagaggcaggtattgatatattacatattgaagtcaaaaataaatagcagaaggaaccaactaacccagccccacctgtacctgaagaccaaccattcaaagccttcttactattgttgtcttcattttcatcacttaaaagagtgtacgtctcagtctgataatgtgttaactgtaaaaaagtcacttcaccaaatccagaagacattgaagccaagataatacccaataatgtccatgtaagagtataatggactgaaaccatcatcataccgatgacacttaataatataagaattataattctgacaccatattgtattttgtggatataaaagggacaaacaagtttcaccaacagtgacggtagtatatccactaatagaattaaagactttggtgttgttagatttaccaaatctacagcagcagataaaatcactacatataacacattatttataagtccaaataaccaaaatatggggaaagggttgtaaaaaagtttcataatgataatatactaatattaactaaaaagcttataatgtgaataaaattagttgagcaaacagtttatgaggaatgaagcgtaaagaatgaacggtatattttctttcttggctgtcccccctctctttacatatatttttctgaatataacccaataccaactactatgtgtatattattcactacacattattttttcataagtgtttatttttaattgccattttgacattgacacaaaagacaattactacatggaccatttcgccctcacacctgatccacttgattccccaattagtgggaagaaaacgtattaaaaatacatgatctgaatatatgtatatactcatttatatacgagtagatttatatggatacaattgtatatatttggaggaacaattttgataatgtttataaatattctttcaataattggaatctttcagcagctttaactaagtattcatcgtctttacaaacggcaaatctcaataaattttctgctgcatgttcgtgttctttgatgtaaaattcagttggtggaatggcaacaatacccaattcattcatcaaccaataggagattctgaaatccttccccttagatagtaattcttcagggaatggataatcctttggaatcttgacattaacaaaattggcacatatgaaatatgaaccctcagcgattgtgtatgggagattcaatttatcgaatgcatcagtcaagattttaaatttcttaatatactcttgttgcatgttcttaaaataattcaatttagtagcttgtggtaaagctaaagccacagcttcttgaaatggagatggagatgcaaaacagattcttgtatgtgcctttgcgacatagttcagcaattctttattcaatgaaatgacccaacctaatctccatccagtagcagcaaaggatttacctgcagacccaacagataatgtcaactgtgcaatctctggcgacaaggtggcgattcttgtgaactcgggggtgaaatatagatgttcgtatacttcatcagcaataattagaatgttatgtttcacacagatatcacctagtcttagcagttcttcccgtgtgaagactttgcctattggattgtgaggggtgtttaaaatcatagcttttgtgttttcgttgatagattgatccaaaatatcccagtcgatctcccactctttccctgtggtgactctgttattcaactcctttggtggattaattggaacgtaacggattttccctccagccaattcaatgtttgaaatatactgatcgaaaaatggttcgaagacaatgacttcgtcacctttattcaaaagacctataagacaggagaagatagcttcattggccccagtgtgaacagtgacattatctttatctaatttaacgttgttaccatagaatggttggtagagtttaattaattcattgatcaaattgggtctacctcttgttggggaatattgattgaccaacggaatttccacgaccctttgcacatcttttatgatgaagtctggtggagaatacgagaagaaaccctgtcctagattcaacatttccctatctttgttgcgtgaattggtggcggccaaggaggcagcttcgtttgttaaagtccaaacatctttgtctgtgttcaaagtgaaatattggttaggcaagatggacttctttgaggaatcagtggaaagtgatttaattgtggtcattatagaactggaacagttataatatatatgatttttcttaacgagatgagatgtaactgacaaaatggaagatgataaaggctgtatcaaatgatttgtggctcttgccattctactatatatatatatatatatatgtatatacaaagagtagtgaaagaaaaaaaaagaaaacaatattaaaagaatatataaagttgtagtattaaatataaaaaattgatgtatgcgtagcaaaggaatgtgtaaaacttaaggtgaatgatacatcggatgtaaaaaatagtagaaactgaaacagacaaacaaacaaaagaggtcgatagatattaaacagctcaataatctgagttaataaacactctttctccttaagatatatatatatatatatatatatatatatattaccggtgcaactattactcatttactgtcaccaccacagatgttgattgtaagtaatatcaacacatttcccacaccacagtttcaattatagatagagacaatcacacacgtttaaactataattctgccaaattgtggtttagggctgctgtacatgaccggcctgtttttcccaagatattgcacaaaaaccatagggttactgattaatttttttagtttgtttcgttttctaattactcgattaggaaaacacttgggcaatcttttttttttctttctttctttttcaactcctctctgtttcttattattttttataactaaataataataataacaacaataacaataataatgatatcaataacaaaaatagtatatcgagttggtaatagaacaaaaaaaaatacaaacttataccataactaaacctaagataaaatttctataagcatattgacgtgatgtgtctaataacatgtaactttttattttacaatctactagaccaatattacgttagtacacgagtaaacaacaaaataaccatatataccaatatacatacagaataacttacttttccacaggcttttctaaaacatcatgtttcaaacatttaaaccagtgacaatatcctcgtcaacacagggagtaaaaaatcatttaattgaaaaatctagtacgaacagcagtgacaacaccaataacaacacaattgatgattcaactagtagtaggaatgaatacactgatggcaacaacaactgtgacaaccataacaatcataataataataataataataataataataataataataataataataataataataataataataataatgatgatgatgatggtcatgatgaagaaatgcgtatatggttacagaaagtcataaatatttccaagaacgatccaaattggatggacatgacaccagattccgttatagcaactgtgtttgccgcaaaatatctagtccaatcattaacaaaagaatcttcattgatagcctcatacagacaaagcccatcacccacattattagaggaaaatggtgtagtacagaaactggaagataaacaaggtcaacttttgttacaattgaactacaatgatatagccgattgtatctccataaaagatcagttcagtttcttatctgatatgataccaagaaccaaaagcttgagagaattggttgcaaaaaataagattagatacacaacgtttattactccagaagaaactaaccaagctaatgtcatgcaaatagatctaaacaatagcaatgataatgatgatactgaagatgaaaatgatgagtaacaacatcaatagcagtaatgatagcaatggtagatgacatatataaatatatagatataaactaaaataaataagatgtaatattaaataatataatctaaaccctaatacgtatcacaaatttgtgtgaaaaattgtttggatatttagaaaagacctatattgtttttttttacttccaccattttttattttcctttttctctttttccttccccttgttttaaaattatccttacaaaagtatatttacataatttttatggatattataagaagtgaacaaaaaaaaaagtatggaagaaaagtatgggattatttcactgcttcctaaccattacttaatttcctcacaaatatattgattgattaaatagacttcaaataacgtcaatttacgtgaaatacgttagtgtcgcaggttaacaattctctatttattatttccaataaataaataaataaataaatagatcatgtctaacatagaagaaaaggatattataccacaagatgaattagatgaaccatggctgttaaactataatattcctgaagggtggtttgattttccgtttccatcatcatcatggaatttcaatataacaaatgagttcccatttattcataacccaccaccaaagggtatattgcaaggggtcactggtttgtacaattataaggtcccaacaaatctacaatttgtccaatgtaataaagtaaatgggttatctttatgggaccaaaacggctggtggcagtgtttattcccacaagaaatcattaagaaaagattaaataaaatatacaatgatatggaaagagtcgacttgaatagatttgtttcaaaggaatctgtagctaatgatcctattacattaagtaaatattttaatgactatactaaatatttactatggaagtctgaacaagataagtctttgtcttcttcctctttattattggattccgataaaaaaagagaagtcaagcaatcttggtttcctgttgacagaataacaacaccagaagatattatgcagacggactggatagatggtgattctaatgaaaaatgtcagaaaaaggttatagggagatcccagtatatgacatacagtagtaataataatatgtttggtaatagtgatgccagtgacaattcaactaaagaggttactactacaaagactttttacgatgatggatcttgtttaatcaaagaaagagaaaagatcattccaaatgatggaagagaaccaattattaaagaaagagaaaaagtcgtcagggaaaaaccttcatcttcgtcatcctcctggttttaagtaaataaagtaaataaatcaacacacccataaatatatatattctgtatacacctcttcacaaacttaacacaaatcattcatgtcgatataaactcttgttactcctttttattatatttcaagtgacgtattacaacatcatgcatactgtgagaaattatctcatttttcttttctttttttaaaaaaaaaaagaaagaaagaaagaaggaaccttgtatagatagataactttaaaaattcataattattttatccaaaaatatatatgtaggtgacacatatacatatactcacacatacataggaccaattccttaaaaatcagatttctaccatttataaacaagtataacataaccagcaccgtctatattcaattatcatgacatttaccattaattctaaggttgcagcatgtggtggacaattttttaaaatgtctcatgaatcaagggtgaccaaatgtacgatgaacgtcaacatctatctaccaaaacaatatttccaaagattgaataataaagataaacagaatgatttaaacccacaaattcctacaatttattatctatcaggtttaacttgtacaccacagaatgcctccgaaaaggcattttggcaatttcaagcaaacaaatatggatttgctatggtcttccctgacacttctccacgtggtgacaatattccaactgatccgaataatgattgggatttcggcttaggtgcaggtttctatattaacgctacaagagaacccttttcagaaaattaccatatgtatgattatatccacaaagaattacccgatcagttgaacaaatttttttctgatgatgggtttgtggattttgttaacaatgtctcgatcactggtcattcaatgggtgggtttggtgccctttctggttttttaaagaacctaaataaatataagtcgtgttcagcatttgcaccgattttaaacccattgaattgtccatggggtgaaaaagcatttagtggctattttaacgatcctttagaagagggaaaagtttatgatccatgtgaattgataaagacagttgattacatcgaggggaaggatattttgattcatattggttctaatgatccattcttggaaaaacaattgaatgcagaaaatttcttaaaggcaattggttgcaatgagcaatggaagaaacatatagatctgaaaatagttgatggctatgatcattcctattattttatcagttcctttgtacctgaacatgctgaatttcatgctagacatctaggtttactaacttgactaaccaatcaatcaattttaataaatgtcaagaagtgtgtagttaatcttttctttacaattttgtaataccataatgtatcactagatgtaaacgcgtagcgtatatatattatataccatctttgatcgactattcctggctatcagtgacaactattccatctaaagatacaaaagattaatttaacgtctcaagaagtctccccaataagcctttgtatcttacaaattacatgacatacaaaaccttttctaataattcaataaaagttacccgcaaagttgtaaaaaaatttttttcttgcttaaaaaattgaaaggactaagaaaaaataagatgagatgagatgagatgagttttggctttttttttttctgcatatgcataaagagagaataagaggttgtgtacactcccattgcattacatagctcatttatcactatcagaatctttttggtgattaaagagttacctactggtgtactcttaggccatataaccgagacataatagatacatattaaagtaaataacatggcgaaattcgaaattccaccaccagataaagaagaattgtttttggcaaagcaagtctttggtgatacgactgatttccaatctagcttagccaattttaatgatgaatttctatttggaatgagtgattttgatgaagatgcagacatagataatggtgatgacaacagtaaagatgaaaacgaagaagacaatggcgacaatacaatgaaaaatattatggatgatcaattattcttctttgatgatggtgaaccatctgaacaaactgatcttatggatgtagataatgaagaaagccaacctgatgaagatgagactgatgactcaagtattagtgaaagcgagagtgatgttgcttgggaggactcagatgacgaaagattacatatttcaatcatgatgacaaataaaaccaagaaattgagaacttcatatgaagaaactaaaatcaatggtaacgattatgtccaaagattaagagcgcaatttgaaagaatttgtccaagacccaaatgggtggatgacgaatctgatagtgatagtaataataaaacgttggactcagaagaagatgatggagaggacggtttagaacaggtaattaatggcgatgtcaatgctctgtcgaagatattgaagagtacatacaattacaaagaaactaattcaaaactactaccgcatacaaacttggatatattaagattaaaagatgcaaatataacccatccctcaaaggcagctatacagtcactttcattccatccatcaaaaccattattattaactggtgggtatgacaaaacattgagaatttaccatattgatggaaaaaacaatcatttggttacaagtgtatttttatataacacgccaatacaaaattgttttttttatctatctccaaataaatatgaacaaaaaatttttactggtggtagaagacgttatatgcattcatgggatctttcctcctcaattacaaataggtcagattctttaacacaagttgctaaaattgaaaaaatttcaaggttatatggccatgaagataggcaaagatcatttgaaaagtttaaattgggccatttttacaatttccaaactggaggtgttcatggtattatctgtttacaaggtaataatggctggatcaatattttaagttccatcactggtatgtggatgtttggttgcaagattgatggtaatttagtcgatttctgtctagattatcagtcagtgtcaaatatgaaaaagaagagtaatagcaataaaaagaataaaaatagtggtactgtaagaagctttaaaacaatcttgattgtgacaaatacgtatggtgaagtatgggaatttgatttgaaccaaaatggtaaagtacttagaagatggaaagataacggcggtattggtattaccactattcaggttggtgggggcactaattcaaatcatttattgtccactgaacaaattagatccaataggtggctagctattggaagtgaaagcgggtttgttaacatctatgaaagaaacaacaatggtgccatgaaagatgactctccaaatccaaagcctgtcgctactttagatcaattaactactacaatatcatcattacaattttcaccagatggccaaattttatgtatggcatctagagctgttaaagatgcattaagattagtccatttacctacatttagtgtatttaaaaactggccaactagtggtactcccttgggtaaagttactagtgttgcattttctccacgtggtgaaatgctagcagtaggtaatgagcaaggtaaagtaagactatggaagttaaatcattattaggataatataaaaggtatatacgtaccattactaaagatgcattattttctcataactaccatatatttttttatatatagatatattagtttatatataactaatagggtatttcaaaaatcatatacaggaacatggatatatattactatataaaataaacatatttgaaaggagttattacaatgtgctacacacttacaatcccagaagtatggtgactttaaatatatatattttaaaaagaacttgactgccaagatagacatataatatgtgcgcattacaccttgtccaaatttgtataatacaataggcctatttgaagactttggtctatattgtatgtctcttgtagtagataaaataactaagaatacaatagcctgcatatataaaaaagaagctcgcactcagattcgaactaaggaccaacagatttgcaatctgctgcgctaccactgcgccatacgagccacaaaatctgtttcggaaatgtagaatagaataattaccataattagagaattgaggtgcagttctaatccactagtgcacctagattaatgtaataaattttagggtttgtgttggaaaatgagagtttattactgccatttccttaagaattatttttaattagtttttctgtatattatggggtgcacagatgtacataatatcaggaagacattttatttgtcaccaaatatgtttttcgaagatttgaaaagaaatgaaaaactttaaaagaaaacttaaagtaaataaaagaatgtatattgaatacactatataataaatatgtacaggtatttaatataaaataaaaaagcatctataacttaatgatgtctaccattaccatggacgcagaaggctccaaattccaacagtttgaatcagtcagatcattaatgtactaatctgaataatcgatcgagctcgaaaaaacacataaaaggacaacgttttctggagataaaagatcatcttccataaccgttttttgtaaataatctatacattgtataaaaacataaatagaaaaaacaagcaataatccttaattctcctatatataacgttcttatatatttgttattgcccttactattcgttcaatagtcttgttaaagaattaatcctaagtccaagctataacatttgccttcttgtgagatgaaaaatagcaccatcgagattatgtgagattctagccattattactaatgtcacacatctatgatcacttatcataatatttgtgccattttccaatataatctattatcttaaagatcccaggaggtataatcaaattattataattaattatcaggatatggataactaatacactaagacaccagatagaatggttaatcgagtttcagaaacatataaaaggacaacaacatctgaagataaaactatcttccgtaattcctcccctgtataaactcttggaaagtagtaatgtctgtatttgatacagtcgtgacttaacttattcataaattagatcttcggtccactaaaaaacctataaaaacaatgtacataattatataatatgtttatatctaaatgcaaaatgatccctcctctttttaattctcttcttacaaagctttttctcttaattgccattattgacgaaataataaaatagtctttaataaagaaacctaatgaccgtgctattcatgttctaatgtagataaaatatatataaatatagatagaacgaacagcgaacaacaaacaacgaacaaacatataagtttgacatagccatcaatatataaaggatcgtatagtaattgctttaccgattgtaacaatcactgcttcaattaataaaatatcctgttgacgtcatctgcacttcctgactaattactacaaccccaaaccacttggctatacaaagttattaatttttatgaaaacaattaaatgtgagaatttgaaagctaaggtaaagatctaattgggaaaatacatccaacatatctaacttctaacttccatcatcttacattaatctaagaggattgaatgatcattcatcgagacaaatacaacgctccccatcgggtacgatttgcagttttcagtaatcatcaagatttgcaaatgttataatataacaataaccaattttaatacttcgagagttcgaggatcaaaggtcaaataaaaggtaatctctacatctccaaagcatgataaggatctgaatagacgaatgtaacaaaatgatatagccaaaaactattatctttcaatcaccagtagtaaactgtcacaatgtcacatttggattaaccaaatcttcttttaatttttttaattttcctttggtggcgatttttttctatccaattgtccagacgatatctttgtttattaagatgttatttccaatactcatataatatcgctgaaacatttggtctaattaacttcacgggaactctgacagtttcccatggttcacaatctttccacctgacacctgctacaacattgccaatgtttttaagggtttcctcttctcccacagaaggaacatgaccataattgtttaaatgattatgataacatcttatgctgtggtatgatgtagtctagagtttaataactagtcgggaagcgcagataatatcaaacaaatattataataatcgaagacagtaattgatacaatcggtaagataattactggacgatcttttatatattaacgactatatcgaacttatataattgtttgtttttgttcttgtatgttatacataatatatctatataaatgaagaattacggaagatagttttatcttcagatgttgttgtccttttatatgtttctgaaactcgattaaccattctatctggtgtcttagtgtattagttatccatatcctgataattaattataataatttgattatacctcatggaatatctaagataatagattacattggcagatagctcaagtattatgataagtaccgaagataagtgcctgtagtgattgtatatatagtaaatattctcaatactatattatatattggttgtatacaaatttatgctaaagttctttgagtttttttatatatatgatgtatagattgtaatgtataaaaggtacataaggaaagaaacgtgatatgaaaaaaaattattggctttatatatttctacatctggcatatttcgtctatgaacggcaccaatttgttaacacattttgtttacatctactgatgagtaaacaatacattctctgcattctattattaatctatgtttgctaaaatctgattggtctatctatttattctagaatattcaatttcagtactatagcatatattttgaccactacccattcttatgatatcctttcaattaatatgatttttacactatcactaaatattatgcccaaataccttatcgcacataattctaaatttacattaattcttcttgtagctcttaaaactttttaattcggtaacaataatgtttatgaaaaaaaagtgttaatctgtttataaactgatgtttatgcttgttataccatttttttgaaacttgtttattagtttaagattgccttttttatttgataagagatagtataaataaatattgaaaactaattcaattgtgatataggcaaaaatagataaaaataattctttccctacctatgatgtcctgtttaatactaaacaggacataaaactaataatagcagaaggctgtcaaagtataaagtgaataaatagagttcttaaaaaagaaaaaaaatttatatcttaatcaaatagttcttagcagagcttttatgattgaataatcttcactttattcagagaaaaattaaccattagatatatattgtaagaataaaaacacattctattgtggatatatacatatatattcagttgtactattgattcataaaattaatggaacataatactatttaaaatatcttttatgttgaacatgactatttactgttgatacaacttctatatttacaggaactattctaataattttaatttattcaacccatgaattcttttaaagttattattttagaattattaacactattgtgcacttgatcctttcctattaaagcatctaactgtttttccagcattgattttttagtaacagtcttggatgctaattttttaattttattctcttgcaatattttataatatggatcattttctacaactaaataacccctcttttcagggtcactgtaatattcgatatcttttctcttaattggccttgcaggtagtggaacccatcctcttttttctaaaaaccattcgggtttcaaatgtgccgtcaaccctaatggagaaaaatatttagccacaaaggagccacctgccttttcaatagccgcaacagctttctttgaagcacatgaagcttcaattggccatggtaaattataaataaactgaccttttgccaagatctttactccatctttaatacttccactaataagtcctgtatctttcattttcttcatatctaacacttccccatcctttagagtaagtcttccctttctgtgccattcaataattctttctaaatttaatggtacaaattcttttgaatgaacatttgtaaaaccgattttagggaataatttgtaaataggggtctgaccaccttcgaaccaggatttaacatgacttctggccttttgacctttagtacctctacctgaggttttacctttattactagatggacctctacccaaccttttaaattttttagttgaatttgggggtggttttaaagtagataagatttggatggatctaatgggaaacgattgtgttgtcaggcatttatgggtggtctttaaggaaccaaaccagttagataacatgaacaatataattttatttgtctgtgtagtattggtgtataagatacgtatatacgtaataacaatacttttttagacctctctcttaacttattgttatgctttgcttcacatgtatcataatctttgaatacttttattgaaactctatcgattcttaacaaatttttttaaattttctagttcggatttgtctcaactttcctttacaagatttccaggaacacaaaaaccataaaatcgaattcctcctctttttttattttttttctctctctaattttgtaaaaaaaagggttgagaacaacgagaacagaaaaaagtcagaaatataaagcgtacagttaggggtaagaagtcacagtggaaaataattggtgtgatcagtttcgcacaacatggatggtgtgtaaacaactagaaagataaaataacattccaacaaagtttaatagaaatgcatgctaacttatatttttgctgttcttgtatgatattgtatataaatgttacatatagatttatatgtgcagtgatggaaaaaagaaaaaaaaaacgatgaaatgaatatcgaatgcataaaacttataatattttaatacttttcatcatccatagataatgacatagaagtaccagattccgtggtagcattagtattgtcttcaccattgtcactattatcatgtatccctactgaagaatcgtcgggattgactattcttaatggttttctttcttccatcatatctggtagagaacttgtactaaatctctgtactccatcatagaaagatatatttgtaggctcttcgaataccgtggaaggcaattgagaacgtctcatggcatgtgtttttaatgttgaaggatttgtgaacgttgacatactgttgacattgctattgtgtgcattactaccatcagcaattttgttgcccattgggattgacctgttggttaaagtccctgaactatggatactaccgttcctcatattaaacacatcagagctgttatttgaaccatttagattcgaattgctgttatttctagtacttgatctcgaaggtaatttccatgaactgttattattactgttattagtattaccgttaaatttactctttattgaaccgtgatttaggtaacccgttggttcagggataataataggattagcatcttggtcaccaaaggaatatggctgatattgcttagattcttcaatgtctaagacatcattttttgaatggcgtttcatatataagaaataaaagacaaccaatgctataataataaccacaccagctacacaaccaaccacaataccagcgattgtaccaccgcttaatggactagccgacttattctttagtggcatggttccattgtaataggtgcttgccgaagctgtggtcacaacagtttcaacaactgatgacgccgtcacgattattgtacgttgcactttatttgatgtagttatgacggattttgttacaatcttagtagttaactgggtagaagaaacagagttagttgtagatgatatcgaagatgtaatactagaagatgcttgtgctaatgtagacgttgttatgacggaagaagattccgaaaactgattatttgtgcttgcttgtacagaagtggtggattttggtaagttagaaccttgtgacaacattgaagtgaaaacgaaaacagatcccgataaactcaaagacgaatgtgaatgcaacatagaacctgtaaattctgaagaactagtcaaagtggtgtcgaatgtggatgctgatgcagagctactagaacttgatagtgtattaactttatctttattgacataaacattcatataatctccagcactgttcccacacatagcagcaggccaaccataacagcctgtattgcaattagactccgattgtttagatactgaaagaaggtttgtatcagaaccacaataacaattaccacctccagacaaggcaataaatgcagagccggaacattggccctcacaatatgaaggagactgccaagtataagacccttttgatgtaagtcccatggactgcaatgaacttgatagataacatccactataagaaaaaacatcctctgctgaagttaaaaaaatgaagaaagatattattatagtcaggagtgttgctaacatatttcaatctctatgatataatatattataacgtggtattagtgattactaacaaaaaaaatcacttttgaataataattattaaatctcgaatatatgaatattaaaatattgtcttttttcgatttaatataatgatattgtgatatgaagatgaaccaattcacaaaaatgaaaataaaaacaaattatgtaatgcagtagaacaacaacaacaacaacaaaaataaaaataaaaataaaactaaataaatcaaataaaagtgtaagtgaaagaataagggtatcacagttgctttagtagggacttttccctcgaggaaataccactgttaggttcagtcttcaaaaatattaacgcccttaatgcttctaccaagatctccgtaacagtcactctagaaaaaaatgataaaaaaaaacaaaataaaagaaggttagtttgtgcaataagtagtttaaccaaaaggaagccatctttcaattaataatgttcatgttataatatatatcttttaatattctatatgaatttttacatagtccaaaatattctttatttgttatttttattccttcttattattatattgcgattatttgaaaaaatcttgaaaagaaaacgcagatgaaacaaaaataatgcgaaaaaaacaataccaatagattcgtcgagatgatttccagtgaatttttttccgttgttctagcctttttctttattttcgcattgtttttgtttttgtttttgtttttcctacttgtaaacaataaaaagagacacgaaaaaaaaaacactcgcttttgcgaacgatgcacgtgatatttttatatatataatcgcaagaacgtgtaaagtgatatatcaaagacctttcgttcttttgtttttctttttttttatgtttattgtaagtaagagattgacattgaaaaattcattgagatgagagtagaagggataaggtaagatgacgataatcatgacagtaaccattgtattactcaattagccatttagttcaagtcgagtagtacatgtgattggaagtcataaatcatgtcctcattgaaagcgattgacaagaaagttgcaactaaaaaacaagtatacaaaccaatcctatccagtccttacgtcaatgacttacatagttggccgcatgtgaacgaacagccgtttgttgttgaacttttcaaatccactattttaaataagtgcattcatctgagcaatgttgatatgaaagattggccatggacgattgaagtagattataataagatagtttctttattgtcttcaaacactggtcagaggcctttggcatttttcctctttgtgtgtaataaagacaccaaatatataccatctattatattacaacatatccctgcactatgctatctatctccgcatgaagtaacaattatacaattaccagcaggctcctttgaaatgatcaaaaagcacggtataaacatccaacatggtcttttattattgtatgtcaatgatcaattggatgataaatttgtatctgctataaaggagagagtggagaatgtatcacaaccttggctagacgatttgaccagatacagatctactcaattggatcttttgaagacgacccaaccattacgctgattcccattcatatttgttatttcctattactatcgcttttcttagtggtcagttttcgatttttgtggttttacttccctttttccttttcttttcttttttctttatcatttcgttatttcattgcctcttttagagagtagaggatacaaagagaagatagtgacatatgtcactctgaaatttactgcgagcaatcttgtaagctccttagtcaaaaatactactcttgtatttcatgtttataaatgttatatatatgtatgtatgtatgtgtgtatgtatgtatatttaccaagattattccctcagatgcattatagttcacctatactgcaaataaaggacaacaagaacgaaatattcattatatcttttattattattattattattattattattattattattattattagtgtcccagaggagtatatctctggtagtaggttctcatcgtaggcagtctgcttcgtctaggtgtggaaccttttaaatggaatatcatagaacttctttttttttttttccttctttttctttcctttcccgcttttctctgaagattgaaaaattatatttaaaacaagaaaaaaaaagcagaaagaaacaaaagaaaagaaaattcacaatatgtggttaatgtggtagtggcacagcagtgtagtaaatattagcattacatagcaaacaccaaggtaagagaccactttgacataaaataaaagaaagaaagaaagtgaacaatatattataattatccaagctttgtaccttcttctcgttatcttcaactaattttcacatacacatctaatttatttcaatcatggctgttttaaatccaaacaactggcactgggtcgataaaaacactttaccttggactaaacaatatttaaatgaaaagtttattaattatgaaataactaaaaacagtaccacaataaagatcatacaaataaatagaatcaatggagattccaatgtttcgcaaagaaagggaaaacctatttgttattttgacctagatcttgaatttaaagtaaatgttactaacccagaaaaggatgaagaagaggaaagtggtactctacgtattcctgaatttatgcatgatgattcagagcctttaattgatattaatggttttagtcaatccaattctcaattaatccaaacatctttcattccaacatttaaaactacgttattacaataccaaaatgatttattagaaaaacactcaagtgatctacaagaataaataaatacacaaacaaacaaatagacaaataaacaatagatagttgtttatacacactcaaacacatacatatatgtatatgtatagattattctataacacttaattactgttataagattcaatttggttttttgtttttttttttttttttttttttttttttatttcaatagatatatggaataatcttgtatggaacccttctttggtattcctcccaatcctttccatacttcttatgacacttttcctcatctctcatctgtctatgcaaaagtaggatagcgaaatagaaactgtagtagtatgtcaagggtgtgttaaaccaggtagtcaagcaccaactcaaagaaatcatccaatcgccgagataattgatatgttgtgaaacagaccaccatccgtcacacaacaacttggtgccacgctcagtagggatgaacttcatattaggtaatttaccctgtttaaataacgatttttgttgattggatagatggaagactgtgtatcccaatgccatcaaagatacaatagcgacgattttccatgggcctaacacaattggatttgtgctcaaccatcttgcttgcaaggcgtaagtgaaggggaccaaagccaagtcaccgaacgccaacatgaacccgaatccatctgtgacaatatccatcatggatagaagtccttcttcatttaggactccatcgaaaatataccaggattgtaaaagggtgatcaagcataaggaatcattccatgtgcctatttcgaggtagacgtggtgcaaacaggataggttgattaagaaccatagcagcatacctggtcttagttcgcagaacaacttgatatccagtagtccaccgatggatcttggattcaattctctgccgataaaccagtcgtaaaggacgttgcctgaatttccacccagggcaaggattcttttgttttcattgataaaagatcttaggtagacccaagtggccaggtagaaagaaaagatgcaggtgatgatgttcagttccatgtaattgttgtatagatattgtagttcgggcatttggccattagtcatctgccatcttagagataagacaaagaccagtagcagacagttacttatgccgtttatcttataatctagtctttgaccatttcttaacacggtgcctttaacccaatggcctggcatgaggatgtctagaacagccaaaacgatgaaccaggatagataaggtatccaaagatggtgagatttacaagggtttaaatagaaaaggggatcatgggagatggatacatttggagttataagatgattgatgacgacagtgaagacaggcaatgtcaatgatatgagggtggatccaaggacaccaccgaattcgaattttgtagtttttggatttaatacttctttagacgtgttccttttccccatattcaatcgattgaaagttggaaatatactgtttttgtttctctctctctttctccctctatatatatatatatatatatatatatatatagaatattatacccttaagtgtcctttgtcacttaaaaaagtgtgtattcgaccagtcaatcagtcaatcaatcatatatatatatattcatagtatattgaagatcatacagagtaattatcatcaccaaaagagagagtgaaaatctatacgaaaagagaaataccctcgaagatatcaactttttacttttttttttgtttgttttcttttatatatatttgcaaccctacactcaagccctaaaataggtttccacaaccctaataatcttcttcattttccatttttctaaccttagcactctttgtcacctatcgttatgcatatgtccatcatccacaacacatctcccatacacgagatcttgtggaccattggatcccacaacagcaggactgaatgtgtattaatagtagttggtagtagttgtagaaaccgatcgtgaatccaactggaacacaaaaccctaagaggtcccctctgggttttgttcgatggaattcaaactgcacaaaccctataggcatacacacccatgcatcctcgtttactctttgcttgctcccctttcatatgttcgatttttcgtttacgcaccgcagaaaagggaccaaaaatagaacatcaaaaaaaaaaaaagaaagttgtaaagcagaacgaaaaacccgatggatgagaaaaaaaacaaaaaaaaaaaaaaaaaaaaaaaaagataaatcaaatattgacatatgggtagtaacaataatatgccattattatgttactattatattattgctgcataagattgaaagggtgtgcgttatagacataatcatatatttgtccaaccacttttattcggtgtgtatgtatatgcgagtcagtaagtaagtattagaatgggtgagactgtatcggataccaaaatgttgcatgataacaacaccttctattcctctattgaagaagaattggtcaatttgaaaggtcagctatggtctcaatgggatcaattaattggcaacagtaacaaagggaacaacgatgtatctattgtcaatgaagtggataatgagaccctgtctctcattaataaaaataccctcacgtttgagtcccttattgaaactctaatagtcgcattcaatcaatctaatatatcctctttgactctgtcttgggaaaggagcccctcctttaaaaaatatgataaattgtcgttgaccaaaaatggtttaagtccaagtgatacaatgatatctggtttacgtgatatagattcaaacaattctaaccccctcagtttagaagattcatatttcaagattttgagccatatcaattggttgcatggttacaaattacaactgaaacaaaccatcttgtcgatccgtgatgggaatctcgaccaacttaccaagttaacgcacaattccgttgaatcaccaccactaccactatcattactacgaccatcgccatcatcattatcatcatcatcaccacagaaacctgaatattacacagagagcaataaacaatcaacaagagaccaattattgaataagacccagcaactgacaaacaatctaattaaatccaacactctattgcagtcaagtatcctgcagagtgatctaaatttagataatttgaagcaacagacccagtccttgaaccagatccaggataaatattcacagttggaaaccgtcttcaataagaccaatagattggtcaaatctttggagacagcatccaaccaagagaaaagagacgtttatatttccctaggttttctggccctggttatctcgtgggtggtctggagacgtatttttaaaggtccaacaaaattgtttctttggcttttattcaaatttttcaaaggtatcttagtctccgtcggtgttgtgcaaaagtttacaagtaaagataatattcttacagttccaaatgcaataacagatgctataatgactactggagcaagtttaactaattctaatacagcaacggatattactgcgtctcttgaacaggccgtagatgatgcaattaatcggatccttttacatgacgaattgtgatattcaatcatattagataacattttacaaaggtggaggaaaaaaatatgaatttctaactttcctaaatatataaataagaaagacatcagatatatatatatatatatatatatataagtattgcataattacatcattttcgtctccatcttgaataaataatattcacttcaatctcctttgcatacaataatggaatgcttcacctgtaactaaatcaatcgatatgttgctcgtgtgaaatgattgaaaaataaaataaaaatattttttttttttcattttccttcttttttggtgatgagatgagttttagaattaattgattatagtcgttatacataaatgtatttgtagtgtaacttacactgatatttcatcatataatattttgttatccttaacaccacaaccagtcaagtaagtaggaaataaggttttttttctccccattttgttgattcttttttttttagccatggctccaactactagcaagaaacgttctgtgaacagtcaagattttgaagcaaagaatattaagaagccaaggatttctgttgattcctctgatgaagataacttagataatatgtcagaagatgatcttgatgcagatccagaacaagaaaatgaaaaggatgtggaggaagaggaaggagctgaaaatgataattttgtaaaacaagaaagctcctctaaccacgctgaacaaaaaagattattaaaggaaagaaaattacaaagaaagtctggttcagagatccaacatattaaacatatttgggaaaaattacgttgtaagagccctccattacctaaaaatattcgtgataaattgtctaatgaaatctgggatgtcgctaaggataaaatctctgatttggtcctaaaacatgatgcttcacgtattgtacaaactttagttaaatactcaaacaaggaacgtcgtgaacaaattgtcttggcattaaagggcaaattttacctgttagccacttcttcatatggtaaatatctcttagtcaaactattacattatggatccaggaattctaaacaattaattatcaatgaattacatggtaatttgagaaaattgatgagacatagggaaggtgcatatgtcgtagaagatttatatgttctttatgccacaaatgagcaaagacaacaaatgataagagagttttgggggtctgaatatgctgtttttagagatgaacactctaatttgaccattgaaaatgtttgtaataaatctgttgaaaagagaaacattattgctagaaacttgattggtaccatcgctgcctcggtggaaaaaggatctactgggtttcagatattacatgctgctatgagagaaatgataaagatcgcaaatcaaaaggaaattaatgaaatgatagaattgttgcatgaacaattcgctgaattagttcacactcctgaaggttctgaagtagcatgtacattaatagctaaagccacggctaaacagagaaaattaatattaaaagcattaaaagtacatgcagaagaattgattaagaacgaacatggtaatatagtgtttatcacattattattaactgtagatgacactgttttaatcttcaaaactttctcagatattgtgaaagaacatttaacagatttcatcttgaacaaatatggtaggagaccattcctttatatgttgttggaattagatgggaaatattttgctcctaatgttaaaaaggaattgaacaaatacattgagatgtctaaagagagttctaaaaaagatccattggttagaagacaacagttattaaataaatttgcccctttgatcttaaaaattgttaacaaggattattctgatttattgtcagcaaatatcggttctcaattcatctctgaattattaacaagcgatgacttatatgaacagttagatgatagagggaagaaacaattccatgaactagtggaatccatttctattgcgtttaaaggtgatattacagaagatgaacatccaattcatagaccattttctgcaagattgttaaaatcattaatacaaggtggtaaatggaataacaaggagaaaaaaattgaaccattaattaaggtggaaggtcttggtgtaaaatttgcttgtaaattttatgatgaaattgtagactcttctaatttattaacatggattaacaacaaagatagttcttttattatcgttgcattatatgaatcattacatgaaaaggatgaaggcaagcaattgttggatgacttgaacagtatcaaacaagatatcgatgtttctgaagagactgtcaataaaggtgcccagttacttttcaagttattgaattaaacttaataaaaaaagcaaatagaaagagactataattaagtaataagaaatcaagaagggaatacctttttgctattggaatctttttatctaaatagttatatataatcatctctaaccatctatctaggttatcacttatgcatgtttgtgtatttgatagcacacatccataattatttgtatattaaatatgaaaataatcaacattatataaattcagaaatcggtccgacaacttttgaaaataaagttgaaatttaggaagaaaaattctatacatttttgcataaagtagattagcggtaaaataatatatgttatacaccttaaatagcagttaaaccaactaagtaagtaactcacaaatgacaattttcaaaggataataaaatatagacaagtaggtgaaaaaaaaatataaaaaagtatttgcaaaagataaactttgagatagtaatgagtgaagttagagaaattgaagagtttgaaaataattccaagactatcataaaggaggagcaagatgaggaattagagactcaagaagaaataaaggtgtcagattttagtctagacgcctcagatggtccattctcgttattacctattatcgaagatctatcgggaaagctgaattatacatgctgtgaatcatacgcagagcatatctacttagggacagaaacaggtgaattgctccattattttgaaattgaaactgggaattattttcttgtatcaagaataaaattagacgactctaaagctgaaccaatagacaaaattatcttacttccatcaattgagagagcaggtgttttaagtcaagggattttgacactttttttactcccagagtttgcaccagttccaaattcaaaatgcttaaggagcataaacgatgttcaaattattaagaataatatgataaatagtataatggttttttttttagatcatagcgcaatatatcaagtttctagcagttccttcaatttattaaaaaagtttgataacctatgtgatgttagaaaagccttaattaaaaaagataaattgattttagcccaacgtaatgagtacatgatatttgatatgttagcaaataaagaagttccgttatttaaagtatctgagaccgatagtgctcctaatgaaattggtagtaatggcttaataccaattattgcagattttagttcgaaagaggtattggtttgttcaggtggttcatcatacgaaaatgaagctatggctcttgtgataaatttggatggtgatattactcaaggaacaattgcattaaggaattatccaagagatatcgttgtttttttcccttatgtgatggtgaatattgattttcaagaaatagatatcttcaaattagtaagcaatgaaaatccaattctgatacagactataaaatataataatatcaataatgaacgattgacggatattcgactaatgtttaacaaagtgaataaattcttccatagtgatgcttatctaacaaatgcagatgacaaaagattacaaaaaatagatcaaataatagataaattaaggtcttctccactagtaatatcaaataataaattaaacatggatgttatcaaggaaagccctcctactactgtagagtatcgaatagatagagagaaggcatttattaaagatattatcaatttcagcacaaatttaatattttatgataattttgctgtatacgaaactttccaaatgccattttttatggagattaaaaattataatgaaattcaaatagtaaatatcgaaaagtatttgacttccaacagtaacaatgctcaattaaatagaattcaacaagtagaaataaaatacttgaagttattgcaccatctgctagtactgttgcattgtgatataattgataaaaattctattaagctatggtgttgggatatgaaatatattgatataagaatattattatatttgtttgatctaataatactgggggaatgttggtgtcctaacgggttattatcttttataaataaattaaaatctttaaaggtaatcaataaattaagttcacaatcagaaatcttggagtatttaaaaatcatgaaacaatatcttattaagaaatattctaacgataaagatttcattgaatataatattataatgataacacttgatgtgaatatttttatgcaacaattaaactctaaaattaaaattaatttagatgatttcgaagagataagtttaaatgcaattattaagacaattaaagacaataatacgattgagcaaaaatccttattgacagaaatatacataaaacaaggcatggttgacgatgtaattgcaattttaaaggaagataaaaaatacttaaatttactcaattttttaataaaaaacgttgacaacttgacaaatgattataaacaaaacaatattttaactgatcttgctacaattattacaaatgagtcttttgatggtaatcatagtgataagaataaaaatgataatgaaataataaaaaaaactttaaaactgatgtcagatattcatatagattatcacgctattttagatttaatagataatatcagtttaaaagtccatatacttgaaattataggcattgaagatagacaagacaaaggttttttaatggattattacattggaaagatgtacgagataatcattaaggaagctttatcaggcgcttttgaaaaaattgttaatgaatatcgtgatgatttaaattatagtaaaccaaacattttggaatatctcaggtgcaagttcaagtatgattcaaaattttccagatttcagactcaatatgagcgtatcattaaactttgtaaaggtgatgatcatttatcgaatcaattatatgaacatataataaaatttagtaaagacgacaattatacacatgatattttagtaattttattcttttttgattatgaagatagaaatgttcacaagaaattagtttgtcatcatttaaacgataaacaacttttaaatcaggcattgaaatataatgatttcaaagaagttgataaaaggatagataaatttaacatactagaagttttaagatggataacaaatatagcaaaaattccttattctagtgaattaatttgtaaaattttaattaagcatcgacaaatctatgaaaataataagtctctgatacttgaaatgattcgggatataattccaaaggaatcgccagttgcaattatatcaccattccttatatctgtattaaaccaagaaaagtcattagcagaggatgttacaattaaaaagatgcttttgaaaagtgaattaaataggttcaatgaagttttaggcatcgtggataagatagaggattagagataataaaaaacacagttagatatatacatgtttaaaaagagaataatgttaatattcaatggagttacatattatttacagaattttacattcaaaaggaatagataaacaaaggtatataaatacagatataggtataaaatatatttgatgattgtactcttattcttttttttttatccttcagattcatttactaatttgagtcaatggaatagaaccagagcaaacttcatataaccattttttatcagtatttgataagcctgcacattgttgtaaacttaatttcactcttgtctcatgattatcaaaagaggaatctatttcagttgctatcgactcgtatttccctagaactatttcactgaatttatctttgttaagagtgacatttatattttccacttggggttctctttctaatttaaccgaatatgaattctcataaatatatttaccaaagcctggtgtctttacagtaaagatgtgatttggtttaattggtccctcgatttgatctttaattagtttagcgtatgagatatttggttcacgatacaatgggaaattagcttcattcattgaattcaagatgaagttaatccatcttgtctttgtactaacatttaaggatggatagaatttgaacaaactatttggattgattggatttaattgaaaagttttaggaacagtctgtgatttaaccaaacttttattcaatgttggagagatgggttttctatatataaacccagaaggctggtcaaatttatttgtatttctatttctgtttttatttttatttctattgttagagtttctgtttctgttagattgtaattttaacttttcttccgtaggtgtcgttgaagaaattttacccttttctgtattatctagcacatcaagtaagtcggtatccatgccttcaatctgtctactagtcttttgaaattgtggttgtttgggtaaattagtcgaaattgtctctttagttactttagaagtcataggatgaaagtctaaattagtatttttaatattgttattattgtttttaaaattttgtcttgacctctttggagcagtaaatttctttttgccgtgttttagccccttggtaaattgtttattagaattatttacatgcttagttggtgtagtacttcgtaaagtagtagcttttttggctctatctaatagatcctttaagaaatcttgagtaatctcagtgctgtagagagcacgaggcactctctgaactgcaaccaatttattcataacatacactttcttttgtctgggtttatttgtatatatgtatggtcaatatacacaatcttgtgggaacttggagatcttatctgaagagtatgtttccttttacacatagagaaagttgatagttttcgaggatccttaagctctgcatttctagtttcttccttttttttattttctaccgaaattccttttatctatacacccatacacctcaagaaattgtgaatctcatcaaactctaatcctaataaaccgtaacacgtgtggaaaggaagaaatccatcgatcaattaatcaatcaataaaatgtctgtattcaaactatgtatggttttatttcattattattggtggcgttcatgtatataatgtatgagtatgtagatatgtaggttgatataaatggaattaacaactatcgtggatacatttattcaatacttttcaatttaccacggaattcaccaatagtcttatagcctttcttgtccataatttccttcaactccttttcaattcttgcaaagacagatggaccttctttgaccaactgagtaccgatttgcaacattgttgcaccacaaagtaaatgttcaaacgcatcctgtcctgatttaataccacctgtaccaataactttgatttctggtcttagtctttgttggaaggctctaacgtttgctaatgcagttggtttcacgtaatcaccaccgatcccaccaaatccgttctttggtttaacaacaacagtttcagtgtccacatcgatgtataacccattaccaatggaattgatacagttgacatatgctaatgggaattcattcaagatagcagccatcatatcgaaatgtgcaaaatcgaaatatggtggtaatttgacacctaatggttttttaaagaattcaaaaacttttgtcaagatctctttagtcaattcgaaatcgtatgcaacttgtggtttacctgggacattaggacatgacaaatttaattcagtgaaaccatggaactcactgttttgtaatttttccaacatttccaaattatctgctacagacatgcctgctacagagaagaaaattggtttattatcatttttattttcttgttgacgtttgatgacgtagtttagataatagtcgaagcctttgttaggtaaacccatggagttgatagagcccaatggaaccgagtagtaacgtggttctgggttcccctgtctaaactctggggtagcactctttgtgatgaaagaacctgcatttgagttgttatccaattcttttaactcttcaatagacatacaatgaacaccagaagcgttcatgaatgggttggcaaaagtagcatcaaagaatttcgtagttaaatcagcagacattgtatatgtattgtgttttgggaatttaatgtgttttgtctcgatgacagtgttaataacttctcactattcgacataggcagaaatcaatggttgttaaagaaagatgcctcgaatgtaagaacacgataaatccctaaaagtataaatatttacaagacgatgagtatatatatatatatatatatatatatatatgtcgattaacctcgtgctgatgttccagagtcacataatcattgttataatagtaataatgtaggccttctctcctccccccccccataatactacgctataattgatttattcatcgagaattcgaacaaaagaaaaaaaaagaaaagaaaatttttttttatatttctttttttttttacttgtatcttcggagatttccgagaaatgtagggttgggaaacttagggctacgatatttgtgttgtgcccatttggataaattatatgaagttggaagtgaataacgacgagtatagtgataatggtcatatcttcttttttttttttatttttattcttttcattacttcatgtcaccgttgtcataattatttagtactattgctgctactgctgcaacaactagtactagatttggggaaagaacggcattttagcttcgtcttcatcttaatagaatcattgtctcctaattctgtatctttatgaatatttaagtggtactgtggttcggaagtcacaggatcagtgctaactctacgtccttgaacaatgttgtgtcttaaaaacaatgcaatatcttccaataattgtactctcccctctggagacaagtccttttgattctctgggggggttatcataccttgtttcagttggtttcttgaagctagcagcatttttgtgtcgccatcgaatgcaactctggtggctcttagacaatgtctataagcttgaagggccctttgagaagttgttaatatagaactttgagtgggcatattgatttaataaattggataactttgttactcctttgatagtataatctagctattaattcagctgcaactatggttggatcggaccaagtgcagaggtaaagagaagattgtggtacagatggagagtatggctcggtttatacgttatgctagttagaatacagataataatgtccactttttttttttctactttcgagaaatttgaaaatgttgccatgacaaacaggagtaaaatgaaaaaaaaaaaaaaaaaaaaacaaaggatactcgtgacacatatatatacaacatatttatattcatatacacatatgaaataaatagaatttaagaatatttatttgttatacagtaaatttctagccgtaattctataaaattattatgccaattatacacacacacgcatatacacacactaatagatatatatatatatatatatatatatatatgtgtgtgtgtgtgtgtgtgttcataatatgtaaatatctgaatatatacttacatagaggtataccttgtatgtaatagattataggattcgaaaacagctttacaatggcatattgaacctagaactaccatgcaatgaaacatctgatgtgaattacccaacaggtccacggcccctggcatcaacagagactcaggtaatttgcagccgtatactatggcacctagcaaatagaacatagtttccagccagataaatttaagacatatccggttcaggacttccagatagccgaatttgattatgccgaagatcatggggacagaaccgcttaatccaaaggtgacaaagaatgtggctctgacgtgtttccagtgctgttggttgaagacgtcgttggtgaccacgagggaacacaggctgccaaggaccaccaccatggcgatgaaggagaacatgatatttggatggtcgaaatagccatagtagatgaccgagatcatggagcaggagatcagcagaatgattccgatgtagtctatcttggaccacaggatgctctgtctctctgaatgttgtttcagacaatggaaacatccactgaataggagacaagtaccacaacccagtaagaagatgttgatgaagatataatcgtatagggtggtacttgggaaaactttgatacaaagtttgtctagtaggaagatgcctaatgccatatatatgatcgatgggattaaatgtgagtagacgttgatggattcgttatggaaataaaacagggataatagacagtgtctaaaagagttcgtttctttcacgtaaccacttaaaattttatcgttatctctttgccaggatggtaactcatggaatgtgcagagttttttgtaatagatgtaattggtctttgtggtgcttgtagttgttgtggtggtagttgtagttgtggtaacgatattatcttgaatagtgtcggttgttttacttacaattgaagtacttttacgtctatattggattcttttcttcaaaaaagtgtgttcatgttcatattcatgttcatgttcatgttcctcaatgggacagatattgactttaacgttagagtctgtcatactctatcaatatatattaatataaatatataaacaaactagtttggttaacttcaatccctctgtttttaccaaaggactacacaacacaagtttgtgtacgtaacagtacactcaagaacgacaaatagattctatatacgtttgtgtatgtataaagtaaatcaatcaattaaacagaaaaaatagaaaaaatagaaaaaacagtatctttcataatgtttatatatatatatgtatgtatgtatgtatgtatgtatgtatatatgtatatatatgctttttccaataacatgtcatcttatctaagcatctctataatgtcttcaacaaaagagaaaagagaaaagaaaaagaaaagggaaaaaccaagaataaaaaatacataataaatggctgaaatattcaattgttttgtgattgttttgattgttttgatttgattgacaacgtcgattgaacgaggggaattcgaccaaaacaaaaagacaaaaaaacaaaagagggttagggttagggttaaggtttaaaatccgaaaaacactaaaacccgagaaacacagacaaataacaatagtaaataacaatgggcaattctcaacaaatttttttctctgaatgttttattttctccttttattatttgctttttttattattttttttggttattctcatcagtactgtttttcgcaatatacaatgggggtacgggagaggaaaaaaacaacaaaaacaaaaacaaagaaactcttgtataaatgcattcctctagaccagggcttgttcacagatttagagttactgttcagaagttgcggcatgctttattagggttttgtcttttttctgtttcatttgtttgtttcttttaggtttgtttctttttgcactccctccctctctttttccccgttcctccctttttcatccataatactgtttccattcatttgaaagtgtctgacaaagagatgagcttatttttattctattcagtaaaatagtatggctcttgctttgtaaagaccccgcgtggaagtttgttggtcgttgttacataaagaatagaataagaataaaatatatccacatagcagtggttcgatttgttgtttttttttttttgtttttgtttttgtttttttgataaaaggaaaatgaatactcaagagcaatgggctttgaatacatttgtgacacaggatatattaggcacagggtcttattcacaggtcgatttagctaaatcaaaaataacaggaaaattatatgcaatcaaatgtgtgcataaattacacctaatcaggaacaaaaaggttaaatatgcctctattgagagagattctatgcaaaaattattaaaggcattccttaaaagtaatagtactagtagtaatatttcttattttggttgcgtaatattgtttgccacattacaagataaggactcattatactatatcatggaataccttccaaatggcgatctattaaggtatattcaagaagactcaactaatgctcaaaatgaatccagtattgcttatattggagcacaattaattgacgtcattagatttatccaaagtcatgggatcatccatagagacattaaacccgaaaatatactttttacggataaatggacagttaagttatctgacttcggatctgctaaaatcttgactcccctagatgataaacatgatgaacatgacgatgataggaatgaaacttataatcttctgacccgttcaaactcatttgtaggcacagcagaatatgtgacaccagaattattggcttcaggatacactgattatagatgtgattattgggcagcagcatgcatcttttatcaaatgaaatttggaatcccaccgtttaaggataaaactgagtatttaacttttaaaaaaatcacagactgtgatataaatgaaattctctcgaatagtccaaataatatatcatcgcaattgactgatctggttaaaggggttcttaataaagatataggtcaaagattgagtttacatgatattataacacaccaattctttaaaaaccataacatagatttcacaaaaccagagactgtatggtcaccaagacctgatttatttagatgaaaaataaataaattataaaaaagaaaaaaaaaaaaagatatggatttataaagcatatatatatatgtatttcttcacatgtcatattggttccaattttcttttcacataatctaaaactattaaccctgtagtggtacttggtattatggccattgtgtttctggtaaatcctttatatagccataatatgagttgtgacacatttttcgaaccatattttcttttaatataccgtagtgtattcacatatgagtgccagtagatgtgagacacactcaataattgactatatgcattttgggttgaagctgaaacggtttcgggtaaagccaataaatctaaaatctctagccgttgaaaatgtatcttttgtattttacttataggaaattgaatacattgtaacgtaaatgcagctgtaatccctgatataaatgtaacaaaactctgtttccatttattatttcttgtctgttcagtatcatctcccaaattatgattaacctcatttgacaattgtaatttcatcttttcaaatatactaaaataacagccaaatcctaacatttcctttatcactgtcagattaaaccccgcataacatccaacgataccgatttgtttccatttgttccaaccatatatccacagattagctattccattacttttatcactgatataaccaggtgataaaagtgcatctgtgcgtgctcgaacatatatggcatcaataggcgtcgccactatagtttgtgctatacctgcaacacaaccagtcttgaaatactcgaaccacgtaatatcctcagcaggtttgtttggaattgcatggatatatgtcgaatatagcacaacacctgtcaaagaattaacaaagattggaggaacaataatctttggtataattttccagccatatttgtgtagtgcttgcttaagaatatacaatgatgatctgtgataaaattttttctttttgttaatcctgttattgttcatttcctctctcacataatggtatatatcaaaccttggtggtcgaaataatttgatcggtgtttttagatagaatgaagttaatctatatgtcaaagaacggcctatagctgtaataatcccaattgtggactcagttgacgaagatgagtgtggttctttttgtccctgaaccataggatccgttgaatcatcatatatacgacttatgtctcctactatttcatattgttgatgatgttgtttgatcgaggggctatcgcattccttttctttgtctcttgacatgtacaggacaggatcatttaattaaatttttctttttatggattagatggaagcaaaggtagcagaacaccaatgcttgttggtatttttaaccaatattattatcccttctctatatagttttgccctattttacatattaaatttggatacatttatgacctgtaggtatggttctatcaacagaatgtttaaaacttacgtagatatagctaaatatttactgaaaataatttttttagggtaagtaatttttttttatttttacatttttttgcaaaagtaaaaacaatctgataaaccctgatttacacatcaacaaaaatcataagatacttgatatgtgtaacctataaaaacagcatttaccaaagcttatcattattgaatggttcttttacttgttttcttttacaaagctttttttttattttttaaatgtctatagctttctatagatattacggtttgtacaccagaacgcattgtatgttaattaatcctggagtcatgatttggttaatcataaaatgacagtttgtgttttctgtagatttatatatatataaaatcaggaaactgcgtaaaaaatcttttaagatagaaataggaaaatacatgttaattatcaaagtgaaaatctggctttagaagttcgatctttaagagtgttgttgcaaggtataagtatatttggtattgaaataggtatcttaatatagtatagtgaagtggataccgtatttgggcataagagaaacccgatatttagtatttttttttttcattattttttttgcatcttttgttgtttttataattaacatagtattatattatattaatattttttttttatttctttattccagatttatgtaaaatctctcttcgacttatatctcacagtttgaaatatactagaaattctaatataccaaccttttttttcttttagtaaggatgcttgatgcattataggcttagcaaactttgttttagaatattgtccaataaagaaaaacagatgagagtctcatctatttataaaaaaaaaagattagtcgcattataaagatagagattgttgtatatgaatgaagaaataacagaaaaaagatagaatcaacaacttgaaacaacaagaagaaaaagtaggtgtaagtgataagacactttatgataagggaggagaaaactgattggataaacgttttgttatggtcacttatactagaaggagttaagtaaattatcattcatggaagttataattgtctattttgttagagtttttgtaacttgcaaaatatttatttttttcactaaaagtattttctagagagtataagtatataaaaatctttaataaaaatgttgaagttaatgaatatttttttattaatattgtataactgaaggatcttcgtcttttttatgaatgacaactaccccaaatgtcatcaaaaacatatctttttttattttgtttttgttttgttttcttccttctggtccttgttatatacagtaatgtatataaactaaatgttaatgaagaattacagaaggcagattcttttctcaaaattactgcccattatatgtctctgaaccttaattaactatccaatttaatatattaccggattaacaattttatatcataataattaattaaatattttgataaaatctcatgaaatattttcaatagcaggtgacattgttaaacagccagtacacaatcttaagtggtgcaatagcaatagatggttaatttctcataaaaaatcttagtaatgttatctttcttaaaagtatgttgtgtaacaagataccattaccattgaaattgcataagattctagctgaatttagaattatctattgtgttcatctgccccgtattaatgtactcttgttgctgtgccaccataacctattgtcctaaatgttctatgatcttcgattatattattgtaactaataataaagatatggactactaatccattaatatatcaagttgaatagttgatagagttccagagttgatagagttccagaaaacatataaaaggacaacgttttctgtagatggaactatcttccgtcactcctctcttacacaaaatttaaatatattatatataaaataaataacaaacaaccatcgaacatcgaatgcagaatacaataagcaaataatataattatataaactcgatatagccgttaatatataagactgtattaataatttcattaccgattgtatcaattattgtttcgattattaatagattatccgtttgatatttctactgcttccccaaataatacaaaactctgatcacattatattacaacaagataatgttatagtttggacttaggactaattctttaacaggactattgaacgaatagtaagggcaataacaaatatataagaacgttatatataggagaattaaggattattgcttgtttttctatttatgtttttatacaatatatagattatttacaaaaaacggttatggaagatgatcttttatctccagaaaatgttgtctttttatgtgttttttggagctcgattgattattcagattagtacattaatgatctgactgattcaaaccctaaaatttattacattaatctaggtgcagtagtggacctcaattctctaatcatggtaattattattctattctataacagatagcagttgttgatgggcggttagtgtagtggttatcattccacccttccaaggtggagacacgggttcgattctcgtaccgctcatatttttgcaggtcttttaacgttaatactttgatcacattgataagtatacaaaaactgtaatggaagaagacctgccatgtgttatgggctttttttggggtacaatatatgataaataattactgctattgttctttaaacatgataaatagaatatactattctgtatgaggaagatttttctagtctagataattaagcttaaattttataagtatgaaaaacacggatggctatgtcgtaattagaatggcataagttacagtagctaaaataggtttaacaaataaagtggcatgttcatctaaatatcttggtataactcgttgttttataatctctctaaatgacttgtcttcttactattgtagagaataaacactagaggttccaatgaattaattagttcactagaatatcactgtgtttgcagattaacaaatggtttagacagatatcatattacgaaacaacaaaacaacattacaaattgtagaagtaacttgatgtatatatacgtatagtgtataactttgtttgtttgtctgttttattttaaaacaaaatcaataataagttttttcattcaattggaaacaattgatcaataaaaatatttgtctagattgctattagctttagtaatttgaatatatcctactttcaatattgggtaaaaagtttacaaccttattttcttctcattttagccttgtaccatctaatcattcttggagtagagtttattttgagtagaagtaaaaataaatttaataatatcagaaatttgctcgtttgctaagagttaaaaagaataaatgaatgtaattacgattaattgaaataactctacctcaagtaaaaatttaatatatcctgttcacaaatatactgagtaagtcaaacaaaacccaaaaaaacaaaaaacctgaaaaatgtactaatttaatagtgataggggaaaattgtatatcgttttcatttttctctatattctaccgtcatcgtctataaaattttcattctcttccataaagagttctgtttcagaatttgattctaatgtatcatcagataagtcttcctcatttaatatgtatgcaaataattttcttccgtcaaagtatcttctattcataattttgcagcatgctaacgccccattcctatctgagaaagtgatatgaaattcacctttatctacatacatagcatgagaaattatggatccaaaggatttgcacccatcaacaaggtctacttcaatttcttggagttcatcagtttctaggtctcgatatatatcaatcacattagccagcaccaacgttttctccttccttgaatcaatgttagtatttagaataatatcatttgttaccttccttcttttattttgaacatcatcgttgccatcatttacttcattatcttgattgggaatttcattattgtttataaacttcttgtcactgaaattggcgtattcaactgacaattgtttacctttaaaattataaccatgcatcatttcaatagctaatgtagcatattcttttctacaatacactactaaagcgtctcctttaagttctccttggtcatttgtatataacttacattttattttatcgtctttacttctttcaatatctccaaatttattaaattcatgcagtaaatcattacgcaaagcatcaatctcacaatcaataggtaaatttgaaatatatacagctttcaaggagatatttgtactctgtttattgtcatttttgcttttggaattcttccagtcaatcttggcttcttcacgttttcttttcctttcttctatgatggcttttttttcacgtcttaattgttctttaagttctaattcttcttcatccatcaatatcagctctgtcactaaaccaacacaagtaaagaatattaaatagagaattgaatccaggtatctttgttttctgggtctcttgttgtaggaatgtcatgtaaacacatgcatatattggtgatcttctgaccatatatacttgattttgaactgtaatgaagaaagattttatttttcaattcggttgtatagtgaacggtgtgcacaataaggcaaaactgtctttaactgtgaaaaagttccataatgagctattgccatatttcacataaattactatggataattctttaacttcaacaatattttatggtaattaaatatacaagcacaatattaataaacaaagcttattaatataattgtgtacatatatatatctgtatgagtaaatatacaaaaaggggttgatagaaaaacggatataaaaatatgtgaaatcaatatttgtcaatggattaataacttaaaagtgatagtttatctttttttattttgtgtaatgatcattacataaggttgttaactaaatcagcacacaaagtagcatcttcacctctaccttgagcctttaaagcaataccctttgaacttttaatcatcttaacaactaatgcaaccttggaaccattaaaaacacttttcccaaacaatttcaaagtatgagaattggtgtcatttggagcaaattgggtattacttacaggtagacaacttgtgttcaagattaacttatcagtaatttcttgtaaggaaaggtcttctttgatattgtatacagcaacatcttcactaggtaattcagcaaaggtgttttcaaaattaccagtaaatgagctcttgacatagtcaccagcagtcaaatatattggatcaatttcatattcatcatcgaaaccttcgtcattttcaaatggttcattggtttctggatctaactctctagtcgtaaaatgtaagatatttataaaaccttccattgcgaaggcctcgtctttcttgtaggcaacatagcaagcagcttcggtatttggtaataatctatcaattggtaatgtgaatagttcctccaattggttgtctccctctgaagaacaagccacagtaactttatctaaaacgacgttggtcaatgtattagaaacattgaattggaagactacatgatctttgaacaaatgtttgactgcatggaccacaaattctgcttctggttcagtcaatggtattggttttgatgaatttattaaattaccaaattctttgaattgttcaatagataataattcatcagcatattttgtttctaataaatcttcttgatgttcttgaagatttgcaccttggtaagtgtcattatcaattctgttatctgtttgttttgttcctggtacaacagcatcctttgtattttcgacattattgccaacagcttgttgttgttttttcttcaatttcatggctttaacctcatcttcagtgaatttacgaatagatgatacatcaaatggagtcttgaatgaatcatcgtttgcagacatataattagttaacttgttttccaatgagtttaagtcataataatatttggattgaattaattgttcagcaacaagactgtgtttattttcagaagcatcaattaactccaatgcaattgtggctctatctctaacttcatcatcctgatcattagcaattcttcttaaaagactgacaatggagtcttttaatgttggatcattcttggttaaagcaaatttagataatgaaatgacagcagcagatctaataatggagttttctaatacgactctgttatagatatgcctaacgtataaggaaggtttagatgtaaatggaccttctttacctagtaaatgtaaaaccctgactaatatttcattatattcacagtcttcaataaagtcacataaattgtcaagaaccaattctttggattgtggaataaatgaaacaatatcaatgattgcttcaatgatgctgtttttgaatttcaaaccaccttcaccattttttaacacatcaattaaaaatttgactattgatttccactcttgtgggaaatttaaggacaaagtacgtactgcatcaataataataatcttaaaatcatcagaaacttcatgaatgaattttgttatagtggagactaaagaagaaatatttttagcgttaccagtctttaacaaagtggtgattgcataagtagaaatatttctatttgaatcattaattaatgattccaattctgggttacaaaccataatcttttctgggttattaatagagattctatttaatactcttaatgcagcaaacctggtagtaacacgtggaacagtcaacaaagaacgtagtgtgttaatagcagaaatatacaattcttgtgaaacaagatgactgttgttgattgaaaaagaagtaatcaatttagcagtctctaattgaacagactcatatttgtttgttaaccagttatctaataaagattggaattgtgtgaataactgtgggtctctatgaatcaaatcattgactaatttgactaactgaactttagctaattgatttttaagagtattagcttcggcaaattgtctaacaagttttaataaagacattttatcatttttttttaattgataaactaaacctaatgcatggtattgagagataaaagttgaatttggataaaattcactattatccattgaagagtgtggaaactgttttaaatcaacgatagcctcttgtgcctcattagaaaatctcttgattgtagtttcagaaattggcagtaaatggtaagaagtacacaaagctgcactagatacagcaggatgtttgttcactacagcactcttcaataatctttcagcggagaacgcagtggattcgtctagcacataagttaaagatctaatggcgttaggtttgactaaattggacccgttttgaatatctttcataatggaagaagtggccataaggacatcatcagaaatactgcttaattctttgatagcaagataaaccatttgtcttagtgaatcatcttggtgttggaataatttggagacagagaaaaataacgcagtagcttcgctttcagggaatgtttcaccattagctaataaccttaatagacgagaaattaagatacgacatctcttagcatttacaggcaactcattgaacgtattcatacaatcctgatagattgtcatcttatcagacaattcacctgctatttgattttctgattttttatacgttttggtagacatggtgtggtctggactgcctgttattcaatcacaattaagtaaccagatactaattttggtgtattcctgacttcttattctaccagatagattacaataaagagtacatgaatatatacctttgtgttttttgcatatacgtaaatatatgcctggatatgtgatcattcttttttggttctctccatcttacatttatttttcataataaagtccttgaaatgtcgtgtgaagtgatgataccttcaaataataaagaaccataaataatatacatatatatacagagagaaagaaagagagagaaatagatacgttagagatgaggtttgatggttttctcccactatggcttagttggtctataccatatatttttatatgtatttgttgtaacaaaaattaggatattgatggctgaattattttataaatatataagggatatagatagtaggaagaatacgaggtatgatatgaggggatgaaggataaaaaggattatacatgtgtatctctatgtgtgtaatgtttacttgattacttatttcgtttatttgtattaaaatgctgaggttcgttaatcgtataggtgaatagtacttttgttaaagaaaactatttataattaactgattcatggatttattgattattgtgtcatttggggttgaggttgttgtggttgcggtagaggtatttgtagttgggattgatgttgcatcggttgtggtggtataccatgttgttgtaattgtggctgtggttgtggttgaatatcttcattcagagttagtagtaattgagctaagcatcttttcgacccaacatcatcttttaaaacctctgtgaatgtattatctcttaatttttgtggtaatacgaccttcaataatctacgagcctccagatcatcacttaacctcaaataacatctgatgatatgtttcaataacctacccggtggtgtatggacagttaaatgttctaccatatcttttaagacgttagtgacagcataaaatctctccaatgtagcacagacgtactgcaatccaatatctgccaataaaattttttgtaatatgaagatagctacagttttagacaattcagatgacgattccatgattcttagacaaaggggaacaatatctgttcttaacaagaaactgatgacatcttgtgaatcattttttactagtgcaccaattacaccaagggaagtcaatcttaaatattcaaaggttctttgtcttgaagttgtgtttagaaagggaaacaaaaataatgggatgtgcgcttgtaaaaaggaatgtttggtctctgggtgtgaagccacacattgtagaagtaccaaagcgttacaaacacgattagataattgattcgaaagtaaatttggttgtagcattggataaacggatataatctcagatagtaaggaagtcattacaccaaacgaagaccataatacaattgctagatcgtcaaattgttctctcttacgacctagttctaagagagcttgttctttttgggggccgtatgttaattggcagatccagtgataaatatttggatcttccaaagcatgcacaaaaggtgtattgttattagcgttattagtactattgttgttattgttgttgttggtgttggtgttagtgttagcgttgatgttatgcgattttgtttcaggattagtttgatttggaacagtagtagttggggctataccaggtggagacatattggttgtagaagtgttagcattagcgttagtattagcattattcattaaagtgcttataagaatattttgactagaagggacattgttagtggcattagtactagtagaagcattagccgtattgactggagcaccagatgctgtagcaatcgtattagttgtttgattgctggttgtggctgtggctgtagctgtggttgtggttgtattattagcctggttgttggcagtggtagaagtgtaaactggattattaacaaacatcattatgtattacaatactttaatattatgaggagataaggggaaatgagaaaacaagtcagtactattcttatttgaagtatgggttttttttaaaaactttgagtctaacctctttcttttcctattcaatactttgtttgtttgtttttttagaaaaagaaaaaatgaataggagagaccttaagtagtactaaatatcaatagatacttttttttaaagttcttcttacttcttcgttcttctttctttctttctttcttttctttcttgtcttcagtcctttctctttttcctgttttgttggtgtctcactagaaaggataagtcttgttgatattttaaaatattaatcgttgaaaggctactattaggcagatgtacacatatatatacagagagggatagagtgtacatgtaaatctgaagtatgtagctctcagttatgaatattttgtagttgtcttttcaatgctatttgttatcacttttcgtcacctccatctccatcccatccccacccattctgcgtcttagaatgttccttcccaaaggtttttaaagatggctggaaattagagagaaacttctggtgcggtttgtcatggaacacgaacaagtcacgtgctctgttttcagttttttttttctttttttcagaattgcggaaaagtggtgggattgaaaaattccgtcaaatccgaagagaagtctatttcccttacaaaaaaaaaaaaagaacaattgatgcttatgaggttgaagacgtagtaaacatgcgtaatagtcataaattatacacgttacagagaataggtcatatgtgcattgataatatattgttggtgcgagtaggaaaagagaaaaagagagggattcttatggaattgaaaaagctgtagttctattttttactattcgactgtagatggggggtttctttccagtcaggcaatagatacgtataacagaaaatgttccatattgagaaaataaaaatttaatttatccaccttatgatcttgcattattgctttgttcacaatttaaaaaaatcttgatttttatgttgaagtagaatgttctataataaaatagatagaacaataagattttagcagacattaacgataaattgttgagtaataatcgttgagaggtcaccaaaagttattgagtttgtttattaaatatcttaccgttcgtagaggaaaatggctcaatattaacatatataaagccaaggatttcatcatacattatttttatcttatttacaatctttgtatattattatttctatgttgtatatagagaaagaaagtgaagaactttattataattttgtatactaaatctgtttaatataatattgagaatgtttactatatatccaatgaataaaggcgctcattctcaacattttatgtttttttatgtttgttatgaattttttgaaatttatgtggcttttttcttttattgtattcatagtgatgaaattagtggttgaaataagatggatctctcataaaataaacaatttattttaaaatggtaaaacataaaaacaagactatttaaactctcctgtgtagaattaaaaatattatgtatactaatatttgctgtgaaaaaggatcaagaaagtatacaccatcaaaataaaatgccacacggagacagtactatacgaaaagtgccatgataatttatcaacaatgaaatagcttgccaagttatgttgatgcaaggcttcaataacaaaaaattccaccaacattcattttaaattattataataagataacataaacttacaatataatattggtggtattataaggtgttcttgtattacttgctctattctgttccacatacttaatacacatatataaccgatatacattataacacattttattttaactcttcttttatatgctattataaaaatttttctgtcttttgaaacaaattatttagtttataacatatgtctctaatcgcatttcaacaagtaacaattataagcatggaaaaatgcattatctggtgtgttcaaatggaaatttgtaaaatatgaaacataaataaacactgtgattcttatattaaaatattcttttacaattagatgtcaacttttttttttctatcactctagtatatatatatatatatacagctatactttatatagtcttatatatgatgcttgtattatttaaaatgtgcgagtaatagtttataaaatatacagattatactaaacacaatgtcgtaacaaaacaatgatcctgaaatatgtgaagaagttccatagttaaaactttatcaaaattcagtaaagaaaaaaaaatcaatttcaatgtcaatggatattaacgaagaaagtagatcgctaaggaatcaaatgaatgttgctgaatgccatttacattggcgaaaagtaaaggagagataaggaattatgaatcagttagttataaaatctatatatccaatgtgaaaacactttttttttgaaaatgaacaggcaaaaaagaatgagcaaaataatagttcatcttgtcttttttctttctttttttaacatattattgaattagaaggataaatttaaacaattcactgctcacaatggaggcgtctgacctctgaacctactgtatctatcaaaagtcaagattacaaaaagctacttccacactcactacaaagaacaagcaaatgaaacaaaatcacattcccccttttttaagacacagagtaccgccatattacaccgcattgcagaaattcaaacaccagaccaacaaactcccccccctgctcttataaacaaggtacacgacaagaaagataacaaaagaaaaagagaaccaaacaagctatataaaataaagtaaaatgaaataaaacaaaaagatggatcagaaatttgggtatacttgatacttcaatgacatctgagtacattaatagatgccaaaattcagactggtgcacagcgtttgtatcgtcatctacacatctttccattattatcattattcacaatatcttgctcttctttcctccttcttacccttaaggaaacaataacaaataaagatataaattggccacgatacaactatcatacgccacatatacctcagctcgatggtcgtcattcccggcggcagctgacgggaaaaagcccacacaaaagcgacattaaaaattggcaatatcgaaaatgtaccctccgtctctatttatataaaatttttttcttgaattctatatctttttttttgctgcagagattttatacaaaaaaaaaaacacaagaaaaaattgattgattgtgttacccggactataccgtgtaaaatgataacagtatatttacagctagggtttatccaatccaccaaaaaaaaaagttgcattagggttagggtaatgtttgagccattcaagctgatccatgtattgatgactctacacgaagtatctgctgtatcataatatcaaatctgttatgttatgatttagttttcgatcctcaatgttgattaattattgattaatatcttactttggcatgatatggatggatacaaatgtattttagttctacacttgttgtcacctgctgacacctctcataatcccttaactttatagagcgggtcagttcagttaaaacaggcaaaaaaaagtaatagaaaacacacacacatatatatatgcttgcaactccgtattaagtaatttccataacaattaaaggtaaatgatgtatgtaatctataagtaattgggtatcaaatctatatctctataatgtatttgtatatatatgtatatatatattcttgtttttattcttttttttattaaccctagaatccatattgtttcattattttccctaaagaccaagtcttttcacttcttttcaaattattattactagtatcacctgtagtttcgaggatattatcctttaaaatgaatactttcttcttcttctttaaattattgaccatattgtactctcgtaatggcttatttagatcctgttgagacagtggattcactagcgtacttgaactactgagagtagaccatatagagtcctcccttcccaatttatatagtgatgagccagaagacaccttggggttcaatagagattccataacttccaacaattcgtcttctcgtattatgacattccaatccagtagtgacagtaattgtcgttccatcagattcacgtcttgcaaagtgaataatccatccgtgtattttgtccaatgtttatttagtggggatgaatcattgtggtttttagcactcagtattagacatgcaaggaggattctatgtctactcgaaggcatcccggtggcatgcggtggcagtttcaaactcaaacgattcaaataacacaatgtcattagtaaggtaggtgtgtatacgttggtgtaatctattaattttattatgaattcacgcaaagtgggtagtttgtttttggttgttataggttctgggaccacagagatcactgattctgtctcatatactagctgatctatcatttgattggttatttggctcttcatcaacctctccaattttatttcatcagacattttgtactataataatatatagtgtgtaactatattttcttctccaaattggtaatggcaggaatgtatcgcttctggtgtacagccaacttctatagacaacagaacaagcataatatctacatccaaaaaaaaaaccattcctgagtagatttgaattgtataaaatttatatatacgtttgatatatattacataactgtaatgatatttccaagagttgttttttgaatcatttatgtgtcatctacataagtgaggtgaagggatggaattgaagagtggaaaagatagaaacgtctcttcctgtctttagtcttcctcatcctagttactattcgttgctctcactctcattcttctttttctttttcttcttactattattgctattatttattatcaccaatccaaaggacacgaaaatgaggtaatatacaacagtaacagtgatgaaaatagcagcagtaatagcaataagcaactgcagtagtaacagtaacagtaatagtaacagtagcagttactgtagacacagtgttgtgataataatataataataatgcatagattatttttacattcaacaagagaaagaaataaagagacacctcatacaaacttttcgtgtctcctccaaaaagaaatttccggacgtttttcgcatcggaagagaaaatttggcagttgtccaaaacaggaaacttctttcgtgataccagctcttactttcattagtgaatttttattattattattatttttagtaggagtagttagtattagtattgatattatacagattccttttggaaatacacaggatatattgacataattgatatatgtggagggaggagaaaaaggtgagtttaattttaaacgattgtgaaaagttcacagctctctttgaaacaacaacagtgaactatctgtaactgtcttttctttatcgagtgtaaaaggaggggagcggagggggaagaaataaaggaaaagatcgataagaattctggtttccattaataatgcagataggtatatattatatatatatgtatatttaatcaataactacagaaaaatagataggtggactcactttttcaaagcaattcattttcaaatgagccctttattgcaccaatgactgcactactctgtattttgtcgttcccacctttcgaaatggaatattctatatcacctagtttcgttaataattctatccttgttttctcttgttttaattcatacgtctctaatatctcaataattccttcaattaaatcaattaatgctaaccctttcaaactgcgtactttgttcagtgtataatatgctgtattccaatcgtcttctagtatagatttcaatactagcttaatatcagtgggtcttggtgcaccacagcactcgtatataatatcctcacctatctcggtgtcttcatcatccttatctaacgtagccttgcttgcttgcaaaacatttaaaacacgtctcatgtcacctctggataatttgattaatgccctttctgcatcttcactcaactgaatcttctcatgcactaaaacattagcaatacgacgttctatagcctccatgggcagtggctgaaatctgaaacgggtacatctacttaataacgctggtgtcaacttgtgtgaataattggccaagatacaaaatctagtattcttagtgtacttctctatgatacgccgtaatgcattctgggccgcgttggtcattgcatctgcttcatccaatataatcaacttgaaaccctttgaaaatatttgtcttgtggatgcaaattccttaatttggttacgaacaacatctatccctctatcatccgacgcattcaattccaagaccatattagagtagttcttcccatatatctcacgtgctaacgcaactatagtagacgtcttacccgtacctggcggtccatagaataacagatgcggtaatttgttctctgaaatgaatttacgtaaaatagccactatctctgtttgaccatacacttcacttaaatccaaaggtctgtatttttctacccaaggtaaattctcatctttattatccttaattgcactcgtcatccctttaaatcttgacctcttgtactgtataatatatatttataatttctaagttgttcctaaattatcctaagtctatttgtatcaaacttgacaaagaaaaaacctgaattgcttttgtaattgattatggaagttgtagttttaatctactagtacacctcacacctcacaccggcttcattacccacttctgcctatatagtcatctttcttttctcttttgtatttcaatcaattcttcgagaccagaagaatgaaaacttttcattttcctttttcttctgttctttttttttttttccacaaaaatttctagtttgaagaaattgcagatcagtgacattcgacttctttcaatagagagagagaaagtcatcgaatcaaccaactatcctctaacaatgtatatttctagaagcatatcttcttgttataacttgaaatagacaagcatctatgttcttttttttttcctttcctatctcagtttttttttttcttttgtcctgcactaccatctatttggtagttgaaggttgtacgttctaaagtatgctaatatttctctcctctccagtagcataattaaaccgttcttacatacacgttcaacaaatttaaatgattcattccaatgattgattctctgatattttggtttggttggctttttatatcatcggtctatggtcagaaatatggtagattcgaccaaacaggaaatgggttagtagaagatttcatggccaattctttcaatatatcatcttggaaaccgatctctgcaaacatcactcctggacaacaacatttttactctttcccaatcaatataaatgcctcagggaccggatttgcaccaagttatgaagtgttagtctttataagtggtactatatgtagataccctctatatctacctaatgataggtttgccatggaacagaacattaaaaataatgttacaaatgatgtagaattggccatgtggtattcatttaacaaatcaatggccacaaatagatctttagcaatacgccaacttttttcagctggttatgtggaaagtctagccgtcagtcccgttaaagttatttataacagcactaacaatactttgatagatacgttaacgtatccggatttgtatgtcatggtccaattgttcaacactactacaaatgaacctttggaatctgcatcagctaatcaagaccttgtttggaattataacttagcaatttcagagaccgatttagtatatcaatgggatgaaaggtcttggctggaattattggataccgatgacaactctgcattacttatgtctggtaatgtgacaagcgacagtctatctgcgtctactaattacacattgtatgacccctccctatacgacgtttatatttacactgaggaggaatataataagatagttaatgcagatttaacctattctctttgtgcaattaaaaatggaaactatttgaccacttctgcaacagaaaacacaacaagtaaaaatttagatgagaaccaactaagagtccaaaaatatgtctcctccagtaattatggaatgtctgaatatttctatgtgacgggactaaatgcatcaaccacctattattcattcttagtgaaaaaagtggcacaaagtggtaatttaaccgatgttggtggtattttattcgctgcagaatcatttactacaatggatgatgatacctgctctttaatccatagtttagagttttgccgaggggttgcatatgcagtaccttcttcatcacttgcaggccataataaaacattgttagctgcaacttatgaggctattgcgtctcaactgtacactaatttttcatatgctttgcagttgataccctgcgatgctgagttagatgcaagatactctccattaagaacatgtgatgattgtgcagaatcttataaaaattggctatgtgcagttactttccctcgttgcaccactgtagagtcccaatattatattaaaagaaaaaaaggcgaaagtaggaactcttttattaacagctttatcaggcccttacgtgactactatgaaatactgccctgcatcaatatgtgctataatatggtaagagattgtcccagtgcttttggatttgcttgcccatcttcagacaagcatgaagaattattattacatagttataattactatgtggaagatgctgacgttccaacttgttacacattaagtaataattaaggaacaaaaaataatatatacctaaaacacacacacatatatattcattcacccgtctatacgctaaaccattcctatgaacaataagattaatatatctatatttctatacatctttttaatatttttcacatttgatcaatcttcctcttcaaagatgaattttcagaatcttccattacagattccttcttcgacgcacttgtatgctgttcttcaaaggttgattcttccacagatgacttattattcaaaatagtttcgtacttttctcgagctttcgtaatttcttctgcaatattcacctgaggacccttttcaaacaccaactttaaaactttactccatacaagttcatcattttcagtgaaatcttccaatttaaatacattatttttttccaaagaccaatccttttgttgtaaacgtattaatttaaccatataacttgaagatctcatggctttgccaatgtcactcaccaaagaacgaatatatgtacctgatgatactttagccttgaaatgcaacaagggtgccctgtatgagtctccattttcatcaatcattttcttttcttcttcagtgattggaattggatcttcaatatctgcaatctctgaggctaaacctttcttctcacaatattcctttgagtaatataaagtatcgtgcaacaaattggcattcaagtttttaattgtatccttggattcttcggttaatggtcttaataaaggatatgagtgattttttgtcaaagaatcagggaaaatcgtcaaatcatatattttcacttgtcttggttcaatagctcttggcaatgggatcccctgcctagcatattcatgtaaaggtttaccatccattttcaaagctgcatatataggaggagtctgttttaaattaccctcgaacttttccttaacagtcttcaattcatccatatcaaggtgtttcacagagttttcagacaaaatctcaccttcgacatcaccagacgtagtagaaataccaaacaatgcttcactttcgtatactttttcagtgccttgtaaatattctgacaatttcttagtacctgatccaacaccaataactaagacaccagatgccaatggatctaaggtacctccatgtcccattttcactttagagacctttcgtagctttcttttacttggggtttttcccgtttgccttttatattcttgcatcctctctgcagtagctctagcaatttcctttgaaaacacttcactactattgaataaatgttgaatcttcaacataaattggttggatgaaatacctgttggtttttcgattgcaaagataccgttcattgtttgtcttaatgaagagtttactcaatattctgactaacaagcacttctaaaaatattaaaaaatataacccatatgaagctatatataatatctataagtctgaagaacttgatcttcctgtattttgtatctcacttaaagcaatgctattgcatcaatattatttcgaatcttgaaatttttgtcttacaatctttataatttttttttttcactgcagcttaagaacactattgatgtagttatagtagaaacctatataagagctaatacaaacatctaacaaatacactatcacctactgtgatatatccactaattttctatcttattctctctttattgttctattagaatacttttgtgtaattaaataataaatccaagtttcttttgtaattatacattaataatgttggcaagcaagacaccacccatttattttttattaagtcaataaatattactttcccatttgttatctaactcaacgatccttcttcttacgtatttgtcttactgttccctttaaactgagactattccaatttacattagtcaatgttctcttaaacccataattttctctcattaatacttcagataagttttcagcagtcataactgactcattactagatgtcatcgatgtggtatatttattactatcatcgttgtgactaataccagtactcacatgatttatcttttcatctcctgtatcatttctcatatctgaactcttagtggctgatttttcttgttcatcagcatactgttgcatatttattagatccatataatccctatattttcgcctatgattcatcacatactttctacacctatcaatctcatcttgtcctaaaatattaagttttgcagtccttttaaatatacttttttcaaacaaatcatttggatctaataatgtctttggtaaagtctgcaccatttgaaataatataatatcacaatcttcttcttttgttctaacatggaaaccattgacattatcgtcattactattattaaatttggaatatttccccaagcctgctgaggaaattccaggtatccttatttgagacttcttacgtaataattcatgctcacatatttttaagatagctaaagatatcttaaacaaaaaatgtgatccttcataaaataaacaatcccaaatcctcaatgtagtctcaataggaacaacaccaataaaacagctcataaaccaactaacagtagatagtgtaatgggaggtaatttaaaaagaaattcgtttttaaagtgtttatgttttggatgtgcttgattagtcaaagttggtatagtttcacatgtaggttcaataatcttccaaatatctggtaaatattccctaatacataacattaacacaccttgatcaatatttaccccctctaaattaacgtcatgcacaccgggtaaatatttagatgttattattaccaacatccaaaaggacttctcttcttcaaggaataataacaatagacccaccaagaaattcatagactggcagtaaccaatctttggattatagattgaaaatgctacaagaacccttcttaatgctgatatcatttcaggttcaccaacatcggaattatcatctttttggaaatgaatgttgttcgggaaagttctatacaaatctctttcaataatttccatatctaaatacactttattcgtatcagtcctctcaattgtattactatgtgaaaaatttctagtacgttccacttcactcactaaagatttatatttaccaatgtttttttgtaatatagcatcaccatcagcaaaataccaccacgcatctcctctccaatcagatgggatcccctttctaacatatcttttcagtttttcacttctctctgggaatttcttaggtggagagagatctatttgtgatcgtatcttatgtttctccaagaataatgtccatttcaattttcttcttcggcaatatatattataccgatgccaccaacggtcatatgtagattcagctatccattttgtgtattttttaaatccatattgatcataaattccatcatcatcatcattgatgtgtatcttctgctttaagggtaaagatgaattgtctaaatgaaaggaattctctccaataatggaagactcattaaaaaaatcacttgatgttgaaaagacacttttcgatataacttgactattcttattactttcattattaattgaattgtctattctcttattttcaccaccatgattattattagtatctgtatcatattctattactccagacatcgcttcttctccataaagatcaataaaactcagattttcgtcattatcattacatttctccttatcatcatgctcaccaatatatttgttagtattattcttcgaagcattaatattaaaaactattgattcctgttcatactttaactcactggaaccttctaatggctgttgaaacttctcgtgtgctaaccaggaaggcaaccttggagacatagtctttttcatctccatatttagattccttatccttattgaaccatgtaaatcaggaacagatggagattttgaaagcatatgcagtcttggtaaatgtgaatccatggtatatctatctctatcaattgtagatacaaaagaggattgtttacatatgagaaatgctgtttactgacttgatcctgttctcttaagtaatatacacacagacacaagcgcccttcttattcccttcctcgtctactatattttttctatacttgctgatcaattctagtggtattttgaaagaaatatagataagtacaacttacctttccaaatttgtgtttatttctatgtgaatccaagtgtcgcaaaatatatttcacctttgcagaactcctttaaagaaagaaaacaataaaaatctatcagaatcttttatataaagaatctgcttgggaaacatatatggatgaacaaagataaaaaatcaactttagaactccatcgcagtaagataaaagagaacaggtgttaaaaaagaaaggatatataccttcacaaaaaataagtctttgctgatgagagattattaattgcttataaaataaactattatattatacacacacataaacaaacgtatatatatgtacatattagtatggttgacaatatttggagactttccgattctgaaagtatagaaacttatgagagttgtatgggaatgaacttgggcaatggaattttgatcagcaaggatattccaagccctgtgttatattctgataacatccattttcaaaacttttgttacagagataaccccatttatatggctactaaatatgttggtatccctgcatcctatctaccgatcgctgaacaagattggaaacaatatatcagtgttaaatgcagtgttggaggaaatttcacctctggtatatatccactattggttgcatatgccgcaaattttgttttaacactattcctaacaatattagcattcataattatccgacctaaaccttatttgcttgtatctaccatattaaaaataggctgtttaatctgtacaattaatatcattataaccttgaatcgagtattcaaattattaagagatcaacatgctcatttaagtgtgaccatatcctctcaaataatagattcactctctcacaatgttagtattatttcattacattttatttctttaataatgttacaactatgtcaagtgttcattgttatgagaacttttgaaagaaacaaggaaaagaggatcatactgtttggtggtgtcatcctaacaattgtaacttgtgtcttatgggttacacctcattgtgcatcaataatatatcatggacaattaaattgggatattttccctgtattcgtatatctatttagaattgcaattgaaactttatacacctgctttataatctcgtttgcgttaagacaaagtagattctggttgaaaaaccttcaaatgatttttctcacattattgacaatattgtctgtcttacttttacctgggttcttcattgctgatatatctaatttgtggatttcacaacttggtgaagttttcgatgatgcctgttacattagttcgacctttttgccatgggaatggcttaaaagattatctaatttacaaaaagcagaaagagctcagagtatactaggtagacctatatatgataatgaacaacaaaattttgcatttgcaaagtatgcattaagaacccaacgtgttcaacaagaaccatatgacaattatgacgatgatgatgatgatagaattgaccatatgacacatgaatcaattagttttacaggttgctcgaacacagatacacgtagtgtaaatagacgacgtgcatctgaagataatacatcagaactacactattcaaacactttatcaccttcctttggtagtctctcaaaccgtcctattgcaggtaattcttgctatgttatggatgatataactgccgatcacgaaagtatcgatgaaatcaacttcaatcccaaagagaaaaaaagtgatttacttaaagctaaatttagttctgcctataataagttcgttttatttactgaccatgttatcctcaaaaatttgggctcagagtcactcagttcaacatctaatagtgataaaactaacacttcaaacaaaaagaagtaccaattaattaagaggcacattggtttggataaaccacctgctacctatgtttataatacaacagacgttgtatttgattcagatggttcagacggttcagacagttcagaagattcaaacgatttcaacaattctcatattaattccaacaaccaaggcatcgaaaacgatcctaatgattatgacactaacaatacttgtgatgaccattacagtgatagacaaccacaacaagaaaacctgtattatgaccaggatttcgaaagagattttggtaaacattattactaagattgtttaaaaaaaaatcttcccattgaagtttgcacgaatattattaaaattctaatacctaaatacatacatacatacatgcatatatacgcatattaattacacgagattattactttttatagaatcaaatagcaatagttaacatcatttagtataataatcccattccttaaacaattcatttaccttcttaccatacaaattaattgactcactaacccggaaccctattcttcttattttgttcttctttaataccatagaattccttctcttattcataataaccaatcttctattgtttggatttaaccagtaaattcttttaaaaccaggaactggacttctttgataaacataatcaattgatcgacttgaatccacaaacaacaaagagggaatattttccagtaaactggatataacttttttcacattattcttaaatcttagatgataacaatttgcttttgatgctgtttcaaaatttggtaataaagtagataatattggttctgtttgcaaaatgatagaatttgaaataattgcttttaatcttctttttgtaacaagatttgattgaaaataaatgtatatcggtaattgattctcttgacgttgcaattggatccttagaccagttaaatcctcaaatttatcaatcagtgattcattgagagattctattttatcacgaaactttatttgatcatttctaataaattggaaatcatatgctaaactttgcaattcattgtcatacaatttttgtgttcttttcaactgtttcttgaattccatatctctatagttaattgatccataatgctttgcatgattataattacgactgttatgacccggatatgaaatggtgttagtgttctcattataatgaccttgctccctaatattatataaatctacaaattcgggtctatcattaatttttgaattatgaaattctaataccaccattttatttcttttacttcttctaccatataaaatacctctctcagtattacacttaccgctattacaagaactcctttttatattattatctatattatctccattaatccataaatctacatcttctgaatgaagcttaaaaggacgtagtttatataataatttatctggaatattttgaaaagcatcctttacgatattacttgtatcattattatcatctttgtggtatttaatgccacttattgaaacattccatggcataacaagtcttctactattcactccttctaagtttgataaattattactcatatcataatatttatcactaccgtctaaaggagaaactgaattccctaagaaaagaggtctataaccggcaaacaatccttcaatatgaatggaggcactagaaatataatctgtagaggggacacggggtacaatcatacttctaatttgtttgtcacgttttgggataacaaatttaggtattgtatttttacaattattcttatcatcaccacgactaccgtcattatctttaccattattattacctttttgaatcttagtactaatatctttatcacagcaatccttatcttgcttctttacgagttcctcctcagtattatctatcttctccttttgtttacttccagtacatatagatctaacacttgttaaatataactccatttttttgatgctcctccttgtacacattatcatcatcatagtctcatttccaattaaagtgtttcctctccaatatgaatataaccttgtgctagtaaaggcacttcttgtagccatcaaagccaaatttccaaccttactcactgatgttaacatggttgttcttttgtaccttattaattccttcaccaaccatagactcataacatataggtatgcgcacacacctttccttcttttagatatgaacacactgacatcaaccacacaagagcataaagaagcataaataattgactaattaaaagtttgtttacttgccccttccttaccaaatcttcatatttttcctttattgagggaaaaaagccaaaatctacatagaactgctaaactgataaaaaaaagaaatattcaaaacataaaggtaattgcaaatgtggaaacatataatttccccaggtccacctctacaaacataggtatagatataattatattatttaacacagttattaggacagataagtcaaaataatttaaggttgtatgtagaacatctcctggtaatttatgcattgaactcttttcatatatcataactagacaatatattgcatataagaaaacctaagtaatcacatcaaaaaataaaataataaaaagataggaatttagagatgagcatgtctcaaaaacctggaacaattccattcactacccttcataaacaattaagccatgaactaactgtgttggcttctgaatctaaaagaaggaaaaactctcaattaaaacaaacatgtgataaatctatcaatattttgaccacagtacacagtaatgaagatttaataagacatcctgattttattgtcccatttatcttagcattttcatcaagaaatgttaaattaacttcaattgctatacaatgcctaccattattatctagtgtccaatgtattcctaaagagagactctcggatttgttagtctctttcgtcgaagctactcacttggctacagatattcaattgaaaatactacaagtcttaccactcttttttaaaacttatgcaagatatatatatggtcatcttgtaactaaattgttacaatgttgttccaatctattttcattggctaacaaatccataatggtcacaagtgcagccagtgcagctatgcaacaactgatagatgaaatttttcaaaggttatcttatgagtggattaccattattcagaatgatatatccggagcaaacaataatattaaaaacgtaaacttaaatgatttagaagaatttcaagataagtattctgttttaattaacaatcagaatattaatgatgacaattatatcaaggtaaatacttatagatatgatgctaatagaatttttgcaaatctcatatctttgttagataaccaatttcagtcttcttccactacagtcattgccactagtacaatctcttcttctataaacacaagtaaagacattgataatactaatgatggcaatattttagttctaaaagagttgccaatggattacggactagaaatattagaatccattttagaaaataatatgtctgtatttttagattacccagatttacaatttttactaagagttaaagcagttccttttttactaagatgtataactaccactcaaaacttcccaattgccgttagatgctatcgttgtattaaacttttgttaagaaaggaatatttaaaaaatttaaacttagaattacaggtagtattatctcttttaattcatgtcatgcgtattgattctaaagctcccgactggcaacgtgtactttctctggaattgtttaatgatctttctgatgatttcgaacttgttacactgttttatttaatgtatgataacagcaatactaagaataacgataaggataataatcacaatggtgacaaaatgacctccatcatccagacctttctattagaatgtctgaatattcttaaatcgaatgactatcaatctatactgagtatttctgaaataattgaggttatggatatgcccataattactcatgatttctcatcatcttcaaattcaagttccaaatttatacagttacttgataaagtgtcaccgccatccattaacatcacttacataatttggttagtattatcgatcacagataaattatctgaagaattaagtgaattatccttaaagatatacacaaatcgtactgacaaaaatagtgatctgaatagaaataccatgatagccatatacacaggaatgttcgaacatttatttgaattaaataaaatatttttatattctacttcgttagataatcatctttttcaaactgtagtaagatctttccaaaaattgactcactgtgctggaattcttcaattgttgcctaatctaaacaaatgtctaaatgtgtttgccaagagtattattcaaaatatcccacttaaaaatattccacctcttactattgataataataaatcagaagaaccacttgatgaaaaaatccaacctgctggcattaatttgaataaggaaaaggagaaaaatagtatagaaatagatgaagatactaataataacaacaacaataacaatatttcttctgcaaatgaatccctagaaaagcataaattatatccaagaatatttacatcaagacatgtgaatctgttcagagcactaatgtctttatctatttccttaggcacaaatttcgataaggttagttgggaatatatgttattaacctggcaatgggtgtcatattacatctatggaccctcaattgattttatggaaagctattactcacaagatgttccgatagcaccttcactttccaggaatgatatcaattcgattgaggttggggtattaaaattatttgaaaacacaccaacatattcaactaaatcttttaaaacattaatacaaagtttgaataaactatcagataccacattaaataacataactaaaagttattatcctgtaagtttggacggtaccatattatcctgtgtttataataaaggtttttatattacccagattggggagatttgttcttataacacagaaagattcttaaacaataataaaggtaaaaaatgttgggaaatgattatgtcttactttgtcaaattaatcagttcaagaaatatcccgagttattctttacgccattatgtggttcgtatttttaatgatattatcaagggtgctactgaagagattggaatgattgaagatattaatcttaaatcatcaaaattcaaatcactggaacaacttgttataaacgctatgatggactgtataaggtcgttatcacaattaactacgtcaaaagacgatatttaccaaggtgtcattatcactgatgctgaaattatattgcaactattgctatctctcaaaggaattttgaatgaatttggtgacatgattactgtatcttggccagtgatatttcatataatcaatgtcccatttgatttttggtcaaataaggcgacacttattgaatctcaagacatcgaagattcatcactgttatcaggattgcaacaaaaaagaatggaaatgattcaaggttcatacgatgttttcaaattgatctctgatgatttccttcaatcattaccattagaaactgtcaggtatgttattgatacatcaattaactatgtaaatcaagatatgaatttaaatatctcattttcttcaataagtcaattttggctagttagtgattacttaaagtcacaattcaaagaggagtttcgtgacaaaatatctgacaattttgaagatagaataaatgccggcagtctcatggaaataattacttcaaaagaaacatcgttagtagatttttataatggtttatggatttatcttttagagagtttagttaaatgctcaaaagataagcgacttgaagtcaagaatggtgcaattcaaactttttttagaattattgattcacactcaaattatttgccaagttggaaactgatatatctagtagtgataaaaccacttcttactatgaaacatcaggaggaagatttatcacaatatattgatttttatgatattactataagtggattggtcactttatatcctacgtactttagtgactttgattcgactagagctacaatcaacatagaagcatggattacgttatacgatgcattacaatacttatttcattctaaatttgctggaatcaaatttgtggcaatatctaattataaaagaacattagaatcagtattagaacttcaagatattccaaacactttactcactaaatcatgtgaactttggttagattataatattgtctatagtgactttggtgaacaacaaaattcaaaatctaagagtgattatgattgtgtctatgagttgattttaactttcccttatatatatcaacttgttacaaaacataatacactttcgtcagactttgtggaacgttcattaaccttgtttaatactgcatcgaaatatcctttgcttcctccatattctaaggataacattaaaccttccagcctgcaagaaagcgtcttaaaaggtttaaaaaaatttgaaaatagtcaatctagtaaaattgagttattgattttatttcagttgagttctatgacaacattaatgtttgacacaagggaaaaaattatgaaaaaattagcacccaaattgtctgatgctagtttatcgagaataccaacatttgaagctattagtttcagatctttagaagttttatgcgaaagattaaattttatttccaatattcaaataaaggtttctacagaaaagattgttttaaagatattacggaatttatctgatacaataattaggaaacctctcattatcttaccaaataaagatgatttgccaatgtgggttttagcatctaaatcttttagaaaattatctcaacatctgtttgaattaccaattcaatcattattcagtgattcatttatttctgaattccagaacttatttgtgaaatgttgttgtcttccaatccaaaaaagttcaagtgcaagcgattttaaaactgcagacaatgatatcttagaatatgatagcttaaaatccattctattagaaaaagctgtaataaagttaatgactgaggctagtatacatgaattcatcttgtgcgtatggaatgcttcctttgcatacgtgcataatgatatagaaaacgcattcatatctcaaagtgatcagccagacattgttataaagaatatctgtacttttgaataccaaaatatatttggatcaacagttgaatccaaattttcaacaaagatttcctgttctaaatattgtctggataaccttattgatttcctattattatctgacgaagaatataaactattaagacatttgacagcaccatatttaactcttagaattgctcttgttttaaaaagatatattgcaaacgaaaacttaattggtagagccccaattccaaaagttagaaagattgaacttttaacattactgaatggtctttgcaaaatatttgacatgatagtcgatacaaaacaacacaccacttacaaagtcgaaattgataatttcttgaatttacaccccttaatattaaaaaccattccagttgcacataaaatatcaggattacaagatattgtcttaaatctgtctcttcattttgccaaattagattccctttcaaaatcaaaatcaaatagttaattatatatttatgcgtgtatatatagtatgtacgtcaaattgagtacaatctacgatctataggtaaattcatacttcatcaaaaatacactaaatcactcaagaatgcataacataatattttatattatatatactataaaagagattgtctctattcacatttctgaatttatttaacaacctttcataatgttatataaataaaatatatcatttcaatttttccattccaataatggaattaggtcacttggttgacatgccatttcaaagaaactatgatgcagtaattcttcagtagatgctctatatttgacatccacacataaacaaacacttaaaaatcttttgatttctaatgataatgtttcagggtatttcaactttggtgtaccattagtagcaatcaaatacaatgctttcaatggatcctcattcaaatacggaggctcaccttctaacatttcaattgtcataatacccagggaccaaacatcaactttttcatcatattcacgttgcttgaccacttctggtgccatccaatatggagtacccaccaatgtagctcttttacttctcttatcagttagctttgcacaaaatccaaaatcagtgatcttaactctaccgtaattatctaacaagacattatcagacttaatatctctatgaataatatgtttatcatgcaaaaattttaaaccttgacatgtctcacgaacaatgtaagcaatttgaggttcagttaatggagaatgagtgattggatcagctggactattgtcaatgatatcggttaaagacccaccttccataaactccataactacccataaatcatcttctgtctttaaatatgcttcaaggaaattaacaatatttttatggcgagaatctttcattacaaggatttcattaattatcaactctttacgtggttgtttagataaaatgatttgcttgatggcaactttatctcccacttgaatattatcgtaaacttcttcgtcataagtctcagtaattggtggaaattgtattctttcagccaaataaacagatccactagcaccttgacctgccttttcaatcatgttaaagtacggtgttggatcacaactaatggtaacattttgtaatttatccataatttcagcatttgacatttttggttttgacgacttttttagtttagtgacaccagtatcattttgggttgattcagtctttgcttgttctactggtaattcttgttgaactggtttcttaggtgcctgtctcagtggctgcgggaatctattgacagggtgatgatagttaccattaatgctatatttattagatggagattcttgtttcatagcaactgttgcggctgcaagactaatatttacatcattattattgttattaccaagagtatttttctgttgtggacgtactgtaggtggttttggtgcagctctttgaggctgcagtccaattggagatattacaggtccttgtcttattggtgattgattgtaataattgtcattttgatttggcgtgtagcttgtattaataggcaaaggactaatcttttgtttcaaattatgttgtgtgaatttattattgaaattaatattattctgaatataaggattttcatcattatgagatggtgaaattttctgagcttgctgctgttgcgatagattttgatatggtgagtgccttagatgtaatctctgtggaggtacagcagctgaagtatttgggtattgattcttaacatatgtttgttgctgttgtgatagtttttgaggtgttatattattatcctgttgtaattgttgataatgtggtactctttgttgtggtgttgctggtttagatgaagtcacattaaaactagacacagtaggtgtattattagtttgcaatttcagtttatttggagatggagcacttctttgtggcgttaaatcatttaaacctacaaaggatgtatttgtactactactagttggcttgcaactagagcctggggagttaagagatgatgtatttgagtatgtactaccatttctacttgtaggcccaatagggtgattattattactgttactattattcccactaactcttaattcacgtaccctaggtggctggttattattattattattactacttagatcaataccattatattcttgataaaattgcaatacctgaataacagctgcagaatcattattccaatcttcccctgtaattctagaatgtttcaacaacttttcccaattggtaggcattccaacaaagctaccagtctcgggatcaaacccaacatgaactttatgagtgaaattagttggggaagagacaccacttaataaaggacatctggcaaagatcgaatccaaccatgaatgtaaatcttgttcagtcttagtagcaatatatattatttttttcgacgatgaatccagagtggacaaagaattactattattcaatgaaccacttgaatttctatcattactacgaaccacttcgaaacaattttgttttatttggtttctgctgacactgacaatactggtcaatgggatgcttagaatcggatcatcttgatttttttcatttttgtaaagtgtcaaatatgaatcgtttaatacaagaaatcttttttgccatagaaaggaaaagacaccatcatctttataggagactgtgcctgtttttctccctttcatctgttgtgttaaaggaccagaaaatgacctattcatatttgtactactgctattgctactgttgtataaattgctttgagatgaattaagagagttaacactcctgtttaaatccaattgacgcataaacttagtaatgggttgcgtttgattaaaagctgctgatcctgtccttgttacagggggtcttggagcgggaccgatattgttaaaatcattatcagacatatcatttgcagcagcaaagagagacatagtcaatacgcttttttatccttatttttcttattatcgttaatcctaattttaatcttaatattaattaacaaaactatgtattaatgtatctatctatttagtataccaagtgcaatttctataattgattgattgtctaacgtataattaaatgtatgttatgttatggattggatccaaaaagaaaaataaataaaaataaaaaaaacagaataataataccaatcaaaatgattaattaattcctgatgggttgtgcttagactattaatagaagtaggaaagactgaagtgaccaaaggcaataatgatagtagtaataataatggtgaatagtaagctagttaaaaatgagataaaaactactaacgagatttgacgtagatggtacactctttccaaagaatccgataaagccctgacttcccttccttctttcttctcctggagaaatccacaaaagttcgtgtcgtcggcagcagagccaatgtcttagttaagtgcacgaatgtaggtattgtcaagtctctttgctgcaataactgactggatcaaaatagctgaaacgtccaatttccctatcactgatcctcaaccctcgagaaaacaaatcgccttcctcggaatttcagattttcccacaacaacaaatacaacaaaaaaaaaaaaaacaaaaaacagaaagaaaaagaaattttcgagaagaaatttattgacatttcgtgtcctcgaggaaacttcccaaaacggaaaaaacgacatgttttcgctctctttttcatttttgattcaatttatttttatcttcgcgtgtgtcacgtggatgaaagcacttcttggcataattagagccacaaaagtaagttataggttagatcacaacttattagagtagagggtgtcaagagttacgtgtcaagacgatcagcagtggctgaaaatatcgttttagttttataacttctattgcagagtgatgtatctttgaactaaatggttccaggaataattccagaatttaaggttttacccttagacagccaataatctcttcttgtttgtgcatccacagtggttttttttaatttggacgtggtcttgatattatttgaaaccaatgttggcggtattgaagaaggttctgtactcctgctatctatatagctttcattatcatctgaagcattatagttatccccgtctttgtctttgtctttaccttcgtcttcgtcctcatcctcatcctcatctagtaatcccattagaatatctatagattgccagtttctattagacacaggactaccacgacgttttttaatcagtatctcaggattaatttttcttttcttaccaggctttttaacctttataacatcctgactatgaacatgaacaagactatgactatcttttttatttgaagttcttagtaattcaattgtattcttatccaatttgtacatttccacgtcatcatgtccacctgtcaatagttcatcctcacttggatttaaaaatctttcatcactttcataattggcatcttgtttttcctcaccttccataatcttaaatgtcctttttctttcataatgaaatctttcgttctctattattgctgtattaaccacaagtgacctttcatctttgaaatctctcttagctcctttatattttattacattccccagtatacttttcccaattcgatccctaaacgtacattgattcaattcaaagcatttatctgtcaataaatcaaatgcacctgcaaaactttttttaatagtacccaaattaaaggacccacgactaatattgttcgatgggtctcttggatcctggatcgctatagaaaattgcctttttacaggcagcaaagctttccaatgggatttaggcacatatataggatattcgtcttcattaaaacttaatgcaacctcgtcatatgagaagtttttaccatacaattcaaagaactcgatcaataacacaccaaggttctctgatatatcgatctcgttcattttgattcttggatgtagttgtaaaaatgagtaaaccatacagatgatagaaaaccctccaagaccacctgtatgtacgtcattgagtcttcgtgttgacaaaaattgtttgataattagtaccaattcacgcattccaggtgtgacagataaccaatttctaatcaatttggcagcttcaataccattggttctttcaaatgatatatccacatgtatatttgaatcgggttccacaaactttataataggaacacgagtcttactgatcacttcaatgtgtgtggcaaacccagatgcttttagatgtcttgctaaatcatatagatattgtctctgttccttgtctcctgtcttactattaatcacaacatcgatatctgagccaggaagatagagatctgtagcataggacccgaagacatgcaactttgagtctggccatagttgtttcactaaataacgtaacatcttaatcaaatggtttctttgttcgatttcttctttgtttggtgagatataagccacaaaatcttttatttccgtggttagccaatcagtaatgctaatttctttggaatggtcatgatccaataaccagggaaaatcagggtttagtcctctaacgttttttgcactctcatcctgctcgttttcactatcttcatgattgaagttttcaagttcatcttcactatcactgctaaaagcaataaagtcattgttattctcaattaaattaccacttttacttgtcacagagtcatctgtttcatatttgtcttgttcggttgaaagcacatctactatctcattgtctgaaccattactttcgtcaacagaattactatttgattctaaagccaataaattttcatatgattcatcaatcaacgtttcaaacgaattagcaccattatgctgctttttatgatggttatcgtgattaaagacttccagatgttttttcagtctattgaaggatgatcttcttaatctcttacggttggcaaccatattgtgaccatagcaccttgaatatttataccactttgtatagagtgtttatttcacagtaatcataacgacactgccctagatgctcgtactataatgtatttttgtgaggctcatcgactttaaccaacatttctttttttttttgttttattttgtttttctattttattttattttatttttttaattttttcagtttttaatgtacatattttccaacaattgaatgatgacacaatatgcaatgtatgctatattcaataatacaaagataacttggaaatataatataaacagataaaatgcatatatatggaagaacacaataactagaaaattgcctatattttttctatttggacatattaattatattaaatacagatacaaataaatatacataaaaagagggtcttagagttcttagagtttttaaatctttttttttatcttgttttcaccccgaaatttttatattatctttgggtgaatgagattcgttgaatataaattatgctttgatgtagtagtaataatatcaataaaaggaaaaaaaatgtgaataacagttggtgaatgaataaaaaaaaatagtttataataaagataaaccagccaacacgactaaaccaattacactgttcatattgctgtctaaagcaacagcagcgtcagaaaaggccgagacacctggcatagtagaagaagaagaacagcttgttatgattctggtttcttgagtaagatgtgattgagtgacagttgaagtagtgatattagatgaaacagagaaggaggaggaaagagtattaatagtagatgtagaagaagaagaagacttcttgtgagaaccagtaatagtgacacgtggtgtagaagtggttaaaactgtagaaacggcagacttagttacttctggagtggtagtgacatcgacataagtaatagtttcaccattagtagtgactacttcatcagcggagacgaaagaagcaacgaaaagagagaataaagtaatggctaaagaagtggcttgcatagttatcaattttatggtatgcgatatgataaaaatataaaggaatgaaatataagttggtattaacagttaatttctaaggaaggactaaatagttggaataacaaaaaaaacagattgaccgctagtaagctcttgaataatgtttttgtttttgttttgtcttatcttgttctatattaactggatgataactatgatacaggagatgaaaagggatgcttgacctatcctttcaagattctcaaaaacacactggcttatatatgttgcaatccaatctttttttttttttaaagaaagatatatctagagacttcctatgtccattaataaaaccaacattaaagcaggagaacacgttaagaaaatacaagtaattgttataataatcatattattttagtttcctttattttaatggattcttttttcgttttggcgtttgaacacgaaatattaatcatgttggacaaaaccatgtaacaatgacacataaaacaatcatttgaaaaagtccacaattacttctttttttttttttttttttgtttgttctaaaaaagtttaccattaaataaacaaaacccaatagagtggaacttaactgtaatagggcattacacgtctgtttgtcttttgtttgatccattcaaatcaaatcaaatcagatcaaatcatcacgataataataacaataataacaaatggtggtagtagcaattttgttctaaatattgttatccttgcttcaattgtatcttactatatccatttcgtgactcaactatttgaaacctcaaaattaccattaggtgtgtgtatgtgtgtgtgtgtgtagcgaagggacaccaaatgtcaagaagtcgcatctgcttacacgattagtggataaaccgagatagatataagttgttttccttgcttttcttaacaattggcgacagtgaggcgagtatagtgtgctacaatgttaatcataccatgactttatttcgtttcgttaaccatcagcgaaatgagacaaaaaaaaaatgcacgaaatgcttcatattcctcgaccctccatttgtaattttcttgtcctcagtaagaaaagaaaaaagatggaatctactttccttttttaggaataccttcgtagaaaaggatatcttgagcagtatttgaggatgttcttagtttttttcattttatcttattctattttttttattatgcaaccctcattacatttgtcagatttaggaaaaaccaataatgatatatcaatagaaccctaaagaagacgacaccctctccttctcactaaagattaagagtagacaagttagcatttgaatgaccgtgtatactgtagtgaatatgcaatctttcatagccatagaactaagctatccaacataataagtcattacaaatcattaccgccgttcttgatccctaataatcaagagaatcattttatctacaaggccagttattaacatgttctcttctcacacatagtagtgtcaaacccttgcaaccctaacatgtatatcccggtgtgccagaatttctgttgctatataaaaacagctttttttctctccaataacttcgtctcacattcacagaccgtgcggtgggtgtatgggttgcataacagtcctgttttttttgttgtcttccatggatttcccttttaaggcataaatgtacatcactgtttcgtatttctcttaccaaagaacccagtggaaaatacaaaaaacgggaaagaaaacaaaagaaggtagggtgaacgaattcaaatcattgaaaaatgccgaggggacgcaaagaatagcggggggggatgaacagagggggagaatgctaactggtttcttctatcgtctgactttaccacatcccctccccctcccccccttctccccagcttggctctgtcaaaaacagaagggaagaggatggtttggttggtgcggcactctgcaaaatatgtgccagtaccaaactaaccgcattccctccttctacgttctcccccgatttcacacttttcgcaattttccgtaatttcgcagttccacaatattctaagttactggcatcgttactcacttgatcaattattctctcttgagtgtactatcgagtcttcacaaactcaccaaagaaactttcctcattatcctccttttgcaaaaatgcattgtacggtatatcgccctaaatattgttatctataattcttacataatggtagttatttcctgactatgatagtagcccatctactacttgagcttgtactatttatttaaacagcacttattctttttttttgctgtaataaaactggctaaccaaaacaacaaggacaagaacaaaatggctggtgtttccgttaggtatgtacctatttgctcgtaattgaggggggatatcaaatctattatataaaaatataaagaaagtggggagaaaaaaaagatgttagaattatagtatgattcaatcttgaaaagtatgaataatcctataatatttctttttttttttatatttctaggtttttataaacccattgagtaagaaggaaaggcaaaaaaaaaaatagaaacagactcgatcttcttcttctattttataaccttctttaaatgaacatcgaatttatttactaacaaagcaaccataaaaattgaaaaatgataaaaacaaaaaaagagataaatgagttttgctgtaaattatttatcctctactattttcaaatttttcaagtttttcttttgttcgtttatttatttatttattttttgatacagagacgttgctgctcaagatttcattaacgcttatgcttctttcttacaaagacaaggtaaattagaagtcccaggttacgttgacattgtcaagacctctgctggtaatgaaatgccaccacaagacgccgaaggttggttctacaagagagctgcttccgtcgccagacacatctacttaagaaagaacgttggtgtcggtaaattgaacaagttatacggtaacgccaaatctagaggtgtcagaccaaacaagcacgtcgatgcttctggttctattaacagaaaggtcttacaagctttagaaaagattggtgtcgttgaaatttctccaaagggtggtagaagaatctctgaaaacggtcaaagagatttggaccgtattgccgctcaaactttagaagaagacgaataaataatttaaaccagcaatattatatatatatacatatttatatttatatatttcttaataaaatattcgttgtaatctttccttttatttaatcagttaattaattagttaatattaacaggcttcagttagattgttaatgtccctctcccctccaatgctttacaaatgtatatacacataaatacatatatataatgttacatacagcaggaatatgcaggctgtgcagtttcagtctctttggttttcgttatatcaataacacttgtggttggtttatccttacactgatgactattattgttatcactgagagttgaatgaaacgaatcatctttgacttttaccatttctatatcttcctcttcatcactgtcatcacataatattttcttcctgtggtcactgttaaaataatctatatcatcattttggacacctctaacatcttgatagcatccgttcgatatcaaatctgcaacaatggaattaattatattatcaattattcctccccatttacaagtgacttcgaagtttccatgaatcttaacattcagtttcttttcgacctgatatatggatttcaaaatatcctggtgtgtcacctgtctatcaggatacagatcaatcttattaccgatcaaatagatcctgcatcgtctcagttgttctgtcggtatatacttcaaagactcaatcaaccatatctggaaacagtcttgaaatgactgccaattggtaatatcatacgttaagattatcccattgcaattcttgtatagtgatggaatcaacgcatttctgtacctttcctgtcctgccgtgtcccagaatgtacagttaaaaaactgattgtctacattaattaagcgcgtcttaatgtctacaccaatcgttgactgtgtgtacaacattatctcatcgtcatcctcatcttcatcctcgttatagttgtagccatatttataattatacccattactggatgctgttgctgttgctgttgttgttgttgtggacgttgaatcttgtttcaagtgttcattaaataacgaagaataattattggtaaaaatcagcgatcttctcttgttgaattcatcaaaatccgtggaactgtaccgttttctctcctcagtttcattaattagtccaaaacccttccttctccgtctatgtctaataacattatcatcgacacctccaccgtgcaacgagacctcagcaggaactgctccaattaaccctattcttctattatcttttttcatatctcgaagcttaacattttgttcgttattcgttgaagaagaagaactgagggaacggttaacaactgagcccttgagactccgtgacgttttcaatcgacgcaactgtcctttagtgggcagctcgtcacagaatctcaatatgatagcagtcttgccgacatttgcattaccaattaataataatttaatgtttggcagatccgttagaaagtcgccgtggaaagagatcgtgtccaaggacgtgttgattggagaagtaactgacgtgttggacaagtatatatccgaagaagcagacaatgaatagaatgaagtgctgtgtctcttatttgacttcataataaatactgatacatatactcactacaaccataaataaaatccaaaaggaaaggaaagagcacagtacagactcaatacatctctttttttattttattttattttattttattttttattccttctttccttctggttagttagtaatctatatgaacacacacatatagcgaactcaatatctatccttcttacacaccaactctcgtgcttgcttataaagtatttccttaactctctttcactgttaaaaaccgacaatagttctcgaactcatcccatcgactgggattttttttttcgttgttttgttttgttttgttgatttttttcttttttatttttcgtgtagttttttttttgacgtcgttgttttttttcgagaggcgttgcccaacccctaacacccacacaccagaggtattttcttcttttcttttttttttttttttcttttatatacagaaggaagaaaggggaaatgcaagcagcgcataacaaaacttagaagaagaagaaggatatgttctgtaacagtatgcatacatacatatatatatatatatgttattatgtatgtatgtgtatgctaaactcttgtaattgccagcactactcgagaatacctaacagaaactatttagttatgtactcaacaacacgtaacgataatgtacctccaccttcctatcaagatacaataaattcaccaaattatgatggccccttcataccagatgatttcaactactctactaaagtttactcctgtgaattgccagttagagcccatttcataagtaaagtgatgaacattctctctttccagctgtctctcactctagcatttattttactagcattccaatggtctttcttccataacttcatgataaataatggcttcatgcttatcttctccttcataacaagtataataacgtgtatttggctgtctttaatgccaagactggaaaactacgagtcaaaccaagatatcccttggtatgtgtatgcgaaacgcggtcaatacgtcctattatccgtctttactttgaccgaatcctggttggtcaccattgttacgctatcatacagatatgaaattgtgttgagagccattgtgataaccacaatccttgtcctggcaatctctgtgttgtccagatatgatagactgtcgttccttgtagaatcaaacacgtccatttattactggctgaattggtcactttggatcatgattggactagggttaactagtttctttattccatggaacgacaaatgggatctattgtatggttggtttggtgcagtcttgttttccgtatatcttttggtcgatctgcagctggtgttgaggaaggtacattgtgatgaagagatccgttgttcaatgatgttgtatcttgacatcatcaatctatttttatctgtattgaggatcttatctcacaatgacgaatagataacatataaaatctgtatatccccatctatatttctatatatgtgtcagtctataagaccttcaaacgaataaaatatttcatcccagtttcattcactttattgacagctattattattattgttattattattattattaatgctattataatgctatcatatattaaaatgactctttttttttctttaaaaaaagcaacttaccaaattaaatatacatatatacatatacatatatatacatataaaggaaagaaaaaagtaaagataattaaatataattggtcttatatctatacacacatatacatatatattattgagaggaagatcatttagatgtaaccaattctgttggcaatgtctaaagcatcgtaatcagcagttaatctaacgtaggccttcttggtaccgtttggtctgactaaagtgttgacggattggacatcgacatcatataattccttgacagccttcttgatttgatacttgttggcttttaaagaaacttggaaaactaaaatgttaccatcttcgaccttcttcatggcagtttcagaggtgattggttgttcaatgacttggtaagaatctaatctgctgtagtgtgggacagacttggagacatattttggagatctagataacttcaaagtctttggtaatctgaaagtggcactggttctaacctttagagccttcttaccgttggtacctttaacgacagccttcttggcagcagtagctttagcagatggagccatttttgttcctcgattagttgatatctagatgtttcagtatgagtttctcaaatattaaaggaaaccgaaaacacagtaaaacacttgaataccaaatatcacaaaaaggttcttttaagaatacctattacagaagcaaacaacaatgcagcaaatgtccaatactacaaacgtaacacatataacaattggaaccaattttcacagtgggtaataagaaacattggtaatattgaacatatctatgtactattcggaataccttcgcaacaaaaattacgactatagcaagatgcttaagttaatgggagggtatggcgatggatggaaacatcgacatcaaaagatcttttcctgactttgttactgggaacaggaataaacagacatttcccagcccaacctccttctggcctcacaccaactcctggattccagctggccctccttcctacaaagacagatagattcgtaggcagggggtggtgagagagtgatgtaatttctcttcctccccctctccttccctcttgtcttccttctgtttcgtggataggttagacagactgtacaaggactactagtgatccttcccccgcccgctgctcccctctgtggaagggaggaagagatgattgagagcaaaagggaagggaagtgtggtggtagcgcgccagccaacctctctctgccttttgcctcttgctgagattacttgcttgtcagactgggaggaagaaacaaggagaaaaaggtgggggacataatgaggttcaataggagaaggagaaagcagcggtgccagtgttatttcgatctggtcctaacacctgaaacctatacatgttccatgcggcaaagattagagagacgagaattcaagtttccctgtttgctcctttcgcacatcacaggcctgaacgagcgaaactatatcaccactgtagaatatatactactgcaattttgtatagtatgcacacaaataatataatttccaaaaacggaaattgtagtggaaagaaaaattaagaaaatacatccagacctcttacagaaaaaaactactggtaaacgaaaaacagtcttgaaaaagtgcaagttttgaaaaaaaaaaaaatgcgaataatcgtagaatgaaattcactgtatcttaaaatactttgtgttgttgactatacatgaacttgtcatggttgttctctataaagtcgctgatttatttcttagttttgttcagaacttattcctgctaactttaaccaccactagtagcaaaacataaacttgcatacatatatgtacttatataattgaaacaaaataaaagatttaaagaagaaagaacataaaaaaagaggcggagaattaaatataaagaatatgtaatgtatcttcgcaggctgacacacacacatatatatatatacgtatatatatatatgtgtgtgtgtatgtataatcctatatacatgaaagtgtgaatgtttattttcttgcctaaaagatagccgaaaatatcgtctttagtctataatctacggatttttggagaacgtacaccaccgaatttcaaacgtgttgcatcactgatctgccttatatattgccttatttgcgagccttctttaccattcaccgcggtgataaacgcacttctaccttttccaaaatctttcattataatatctacaggaacaaattgattatggaaattgttgttatgatattggttgccagtattgttatatgtagaatttttgattctgtcacgacggatttgattatgtaacatctctaagcatttagcagcagtctggaaacctgcttcgtattcacccctattagcttttctaaaccctaatggaccagtagacaatttaaattccactttacttggtaaatgcagccaatacttaaatttttcatcgtatgtagaatcaggtgaagtcaaaattgggttttgcggatcttcccagtgtgaacatagtgtaaaatgggtgttgtttttagtgaagagacaatgtaacgtatatttgtgtaattgtggtttagatttgacgttgttttgcaagttgggtatcttgacttgcttgaccaagtttgtaaaaccaggagtgattctcgagctcatcttttttctatactaccctatttgtccctgttatcttgttatcagttgcagtattattctatagtttgttctataatctgagaaccccaaaccaacaaatcagaaatacctttcgtattgtatctctctatcatctcctgaagggtactttctagttttccaataaaacccttttctcattcttttctttttttttttcttctatttttttgattttaaacttggtaacgtttagtaaactaaatcattttgaacgaacacaaatttcgtcatcggcttttttagatttgatgtctgggtgtattttttttttttttcctcaagagaaattttttttttttttttttaactttgcgatgacttcgagattgctgaaggtaattcaattgatttatatcagcttagcaaaagatgaaacagtaagggtaaccttagtggtggttactatgatactatcttctatttaatagacaagttgcttgattgaactggaaggaaataaacgaaaaataaaaaaaaagaaagaaacacaatcatcttggctgactggtgtaattatgcctagaaagaagtcggctgctaaaaaagctagagaagctgctgccaaggaggctgctttaaaagagaaacaaacaaataaagatacggttaaggatgttggcacagttgatagtaagcatattcctaatgaaaactacagcgaaagtgacatcagtagtagtagtagtgaggaagaagacaattatggcgatttgatcactgaagatatagaacaaggtattaacaatgttttggaggccatcaaaaataacgatactagtaaactattggatccaaaagtgaagttctttaaagatgaaaatgaacaagaggatgttggtcaaaaagttaagactcaaaaaccaatttacttgaaggattaccatagaatgaatatcttgtctggtgatgctttgaagagtgacgatgaattagatcaaatggagactgtggatggacaaaaatcttttgtcgttcaacagagagatgaaagaaacaaattattagatgaaatcaaaggtgcgatggatgattcaaatggtgaggatgaagacgatgatggatttctgaaaaagaaagaaatcaaacaggataacaacgataataaccaactttcgtatgaaaatgacgaacaatttttgaaggattttcttgcccaacaagcgtggattcccaaagaaggtgataaagtcattgaattggatgcaacaggacagtctgatgatgagaactttaataatgctgtggaggattttgaaaatgcctataattttagatacgaagatcctaattctgcagaaattatttcatatgcaagaaatcaagccaccttgagaagatcaaagacatcctcacgtagacgtaaaagagaagaagaaaaggttgttaaggacaaattgaaaaaggataaagaatctaagattcagaagaaaaagactaaaaaaatcaataaattgactgatgtcttggaacaattacaaaaggagtttggtgctaaaattgaatcgcatatggttgacaaaattactaagactttaatgaatagtgactacaaagaaaatgagtgggataacgttattgcagagttatttgatgatgaattttataataacgattctgaaaaaccaacttggaatgatgatgatggactaggaaataaccatcagtttgatgatgataatgaggaagaaaatcagaaagaggaagaggaagatgaaaggaaaaaagatgtggataataaaactattgataagaaatctaaaaaagaaatgaagaatgcagtaaaaagagaaaagaaaaaactgacagagatggttgaaaacgcggttgaggcaaacaaattggctattatagatgaggttgaaaatgatgaattacatgaaagaggcaggtcgaaggaaagaaatgattccgatggtgtaaaattcaggtaccgtgaagtatcaccagaatcgtttggtttgaccactagagaaatttttgcagctgatgatgctgatttaaacgaattcatctcattgaaaaaatttgcaccatatagatccaaggagttaagaaataaagataagagaaaagtgacaaaagcaaaaaggatcaaagaatggaggaagaaaacttttaatgatgaaaatggtccaagttttgagggtgtttgtttgccaaaagatgatacagatagtgagaaatctaaaaaatctaaacatcatcacaagaaaagtcataagcacaaacattcaaaaaaataaaattatttcaatatttcaatattattatgcataatctcatattctatttcaaaaatcatatgtctaaaaaaaaaaataaaaaataataatagtaattgtaatagttgtattgtagctgcttttaatagcaataacagaaatgtgtacaaacctttctctatttcattgtgtatttgtatattaataagtccttatatatatgtgtgtgtaggtataaatatatacaatgtaatatttgttagaaaagcgacgatttacatgttaatattatcattcgtattattgcttttgttagtactgttgagatgttcctcctgaaaatgatcattagcataattctttattggcccatcatcgttattacttgagtgattatttgttgagtttgttatagtggcagaaaggctctcatttggtatcccactagtagacaataaagcgacttgagtcaaactattacttatactactacgttttagattaataatatttctttctttcgatacagtagttaagttgatatttggtgatggactaaaaatactatgtatataatcacccatgttgaaatttggggtttttaatagattattatttatattattgttagtattagcattactattattgatgttattgttattgttattgttatataaggatggtgattctaatatcatgttgttgggggataagtttatgctatgtttattgaacatatcattattagggtgataattaaagtttttcaaggtagattgaggtgatgttaaagatggttttaagtgagacaaacggactgtatcatcggtattcaattgaccgaacgtggatgttcttggagtagttggaatttttatctttgacgaagagttggtatcatttttcgagtatggacttgtggctaaatatattaataaatcagcacctgttgaattatttatcatttcatctgtttcatgatttgtagcactactattactattactaatgtggatattattatggctattactattataatcagttgtgtcaagttcatctgatattctagtgattcttttcactggagttgtatgaatactacttgaggataatgtagtggagttggaagacgattttttaggggtagatggaaccttcatggttgaggagtcattaggatctttatttttcattggcgatttaggtttaataaaagtatcctttttagggatattttccacaggattgattgtgcacacactgctgttgttattgttactactattcgtatcacttttcttcatagtcactgacaaatgttttttcaatggggaagtttctttactgtcatgtggaatagaagtgattcttttttttgattccaacaggcacagagatggcgtttgagtaccttgaccctttaaacttaagttttctttatcatgtttgttggtattagttgcaccagtatcattattatcagacattgcaatagaattgctagatacttgacttaaaccaagtttcaaatttcttgtcatttgagccagttgggctctttctagaatcctggctgctagatccctatctggggacgtcattactggttcagagatcattcactgtgtgaggacgatgacaggaagggcagagtattgaaccggaaatcaagtgggaaatgatattagggaagaaaaagaagattgattgggccgaacgcagttaaattgaaataccggagatttactgcatgtacagtcttgtttgtatctaatagaattgagaaataaaataaaaaaataaaataaaaaaaggatgagttgaatgagttagatccaacaactatgttcgattggcttctctcttgtactattttcttggcactggctctacagaattcatccacagatcgcaaatccacataggacataggatcatatcaaatatcaaaaatatttcgattttattttttttttaatttttttgggtctttgcagttcgaagaaaaaaaaaaagaaaagaaaagaaatttgatggaaccaccagaaaaaacaactatttcctaatgtggtgtatttcctcatttggtgatacataccaaaaaggaaattttcaagatttcatgtgaaaaatttcttgaaaacaaacgaaattttgcaatgagatgaaaacccaaaagaacatgttttgctgttcaaaaggtgcaaatcaaacacaagaacatttgctgtagagagctagggagacttgcactaattaggacgactctagatattcattatacacacctaccattgcatagtctgttatttagatattacaagggttgtagttaatattgattttgttttattctttttttttttttacctttccttcaaaatgataacaagtgttgcacgaagacgttttctacagactaattggattaggtattttacaaagaagcattattcatacaatataccgtccatattcttgggattagccagtaggcatatagcattatttagtaacgcaaaatttgacataggttttaaaaaatgctccttccatactgtttcatctattcagaataagaagaaaactgataatattctttcctccaacaaaagtaatggcaatgacaacgcacatgattccaaagcaaaacaaccacagttgatgatagcgtttacttgtaaaaaatgtaatacaagatcttcacacacaatgtctaagcaagcctacactaaaggtaccgtattgatccaatgtcccggttgtaaaaatagacacttaattgctgatcatttaaagatcttcagtgatcacagtatcaacattgaagacattttgaaggcaaagggagaaaatgtttctcaatctgctgaggatttggtccttgaggatatccctgagaaattgaaactcatgctatcaaaatatgtcacaaataatgataatgaaaaagccaatagcgaataaggattagactttattacacatttattaacgcagaataagtaatatttgaagtatcatgggatctacatatatatatatctgtaattatatgtttaatcataatatatacttctgtattttagagtatatatcgtgatattaaaagtttattatccataatattaaaaacttttgaatatcaatgacacattaggaaatcaatatttattcagttatttatgcatgcaggaattatttagcaactcaaaaatggataatagataaatacatagcttcaatttttcgtttaagatagtgaaaagttgaaaagattacatgaaagtaatacaagaaatatgaatccaattttttgggatatcatcatcttctttatatttgacaatcacttttcctttaaaataattgtgcttccagtaattcatctcatagttggaataaaattcatgaattttttgtaaatcgttaatccatttaaaactccacactttatcatctttattaatattcgatattccagataaggattcttcttcgtctagtaacttcttaattttaggacgtgtcagctcataaacatcttctatacccttcttttctagaatttcaattagatcagttaataaatcgattgcattactaaatgtagaaatttctatatcgtttgttgaagattttcgtagtgagttaaaatatgataaagtctcaagaacggtatattcattcttagtaaaataatataatctcagaagagcttcatctaacatatatttccttctattttttgcaacttgtcgttctcttttcttaagcatcaacaactgtatcttatgtgcttcagctactttttgtatttcttccaatttattcactgaacctccttgaaatatatcatcttcatcttcatctccactatcgttagggtcatattgtgatacataacttccttgtttatcaaaatgatcagcagttgtcccatgtttggtattaaatatcttcatcttattatctttaaggaaacttaagttgacagtttcgtcattagattcttttctctcttggtgaatcgaattttcagaattgaatttttctgcactcataatattatcctcatgatcttttaaattatcaggttcactgctgtcaaaatgtgcatcctcctcctctgatgaaggatctaagttatattcaatattgatggtggataaattatttttaaacttttttcttaccggttggccttcattatcactggaaaatccctctatcatactcgaattacaattcttcctcatagacacatctctgaaagaatacacacctggaatactattggaatgtgtagatctcttttttttttactatttttatcatcgaagtgtacctttcttaatagacaaaaaaattatttaatatttttttcacctttctccttttcaaaacagtttaacaagtacaaatgttttaaagattgaattattaaatataaaaataatgatttgctatgatcaacaaaatgttgagaataatcacactaataaaattatacttactgtatccattctatgatatatatatatgtataatcaataaaaaatttatatagcattatagaagttgagcatgtgaaatatgcagaaggatatatgtacaaaaattttatatcctatatatttgaggagtcatgcgtacgtaaaatttattgttttacaccatatgaatacaatttgattccatctttatcagtcacttcgatcggaacattaacatttaacaatgggtctaataataactcccaatcataacgtgttctaactgtgcaatttacaaattttcttaacatttgaatctttacagacttaaatttagacaatgactgaagaaaataatataagttcaaatttggaatatctttaaagtatttgtaattttgataattattgaacaaatcagtatctatattagccactatagactcgatctgttctgtaggtacccctcttatcctatctaaaatatcactaatacattgttttatattactattccagtagtaatctggagcttcatgattgtttctgaatgctattaaagtctcttggtcaacggaatggtaatggatatcttcattgtctagacaataattgggaatattatcactatgctgtaacatattttcaataaattttctaggagacagggggaaaacattagtaaatggaatattaatgatattaatgttgatagacttatatggtaatctatcccataagttcttataataatgaaaaaaacaatgaaatgctggaactctaattgattggaaaaactgaccttgttctctggttaacatggaaggctttcttttattattttgaatgtctgtaatggttctattaatgtaatttaaattcaatgacataactacaaatgaagtaggtggcggcgattgtaagatggattcacctggatcatccaataaagtctctgtcatcgatatacaatcggaatataatgaactttcattatatggatccacaggaacattcctttgatcataataatactcttcaggaacatacatctcatcaataaaacatttactgttacaatcaatagttaaatctgttaaactagggaaacagttcacaattaaaagatcatacttagataacaaattaaacaaggagagtcgtttcacacccttaaaataagactgaaataaacgtaaaataccattacctgctataatattacacgattttaatgtgagcgcagtatatgttgaattaactgtatacgataatgattccatacattgttgtctatgcttcatcttatgatgaacagatcgattatccctataattacttccactgtcagaataattattggcagtactgttatttatcttggtttcctttcttaaatataagggtaaaaattccattggagtgtccaatgaaagtttatcaattactaaattctctaagatcaattcagtaataatcccaaaacaacataacaaattacttcttaacggtacagtaacatcagttccattttcaagtgcaccctgtaattctagtttttttatcctctgaagactataaaattgacattcatattgttttgcaaaagaatctgatatttgaaaagtcctcaaatcatcaatcgtgatagattgttgacctcttataatttttttcataaactctttagaaccatcattaaatacagaataccataatggaatcttaaaatttttgtctatttgagtcaatttaacatgcattagattaggcaaataatcaataatatccaacatcaattcgatatatgtgtagtgtgaatatttgatttccagtttgtccaaaagatcaattgttttgcttgcctttttattttttgagattgactgagtattatttgtacgatgatatgaattggttatagaactaggcgaggaagttatggaatttagattaaatgaaccaccaatcaatgatgagtgatcttgtttattataaaatctggaatattttaaaagagaatcctgacattgtggattaacaaattcaatggttgtcaccaggaaccttgcaatcttgtttgtataatttttataaccacgaagcatattggcagttttaaattctgcatgaatcaaagcattaaatttcaaaagtgccatcttatcgaataatttaatatttcttctcggatgattgaacagaaatttgttagatattataccatacaaccttgaatttaaatgacacaatttcaataaggtagagagatccaactcgactaaaattttacataaaatcttatctggaagtgaaagtaatgtaattgtagtattcaatcctgatatatcattattattattatttcgatgattttggttactatcgaaagacccttcattatgtataattgtaggaaaactttcttccgaagattctactgatgatacaatggaagaactagttaaagaaaaatatttggatcttccaaacagttgaaagctcttcattttataaaccaaatacactctataatttattattaatattgctatctgtgttatggcttaaaagaagattttgagacctgcatatatatatgtgcgtgcgtatgtatgctccagcagaagggaaaatttcttttttaaacatataccaaagattatttcttgttaaaatgtacactgtaatagataattcttttccttactaacctatccaaaagccatgagtaaccaaacaactgctagacccttagtagattgtaatcaaactgaaaaaaaaacaaaaggtaaaagcaaatactttaccaactgtacacaaattacaaccattacgatgattgaatttggcaatagaacataccaacgtttcttcaacagtctacactgcagcagcccatctctggttctttctttctttcttcattgcttccactgaacttctcgagagtttccttctgtcgagaaagagaaaattccatcgggattcgaacgggagatctttcccacaaaagagcaaatatcttcgagaagggtctatagcaaaacgtagaggttctgtagaaacacacatgttgtatccaaatctgtgcatgtgagctttgtgtgttataggagatcgatagatctctttatgttgttgaatgaaataaaatattagtcttgcttaaaaaatttggagttttatttaaacacttctttcttactctcaaaaaatgaagatgaagaaaagaaggaagtagaactacaagcaaaaatacacctacacatatacacatttcaagctcctatactttttgaaaagcagtctggttgatttttttaaagaaacaggacgaaaaacctcttgattattgatattctactaatgtggtctgctctaagacgattcaacccaacaaaaattcagaataatttgacacgtagcctaagaccatcgaattatttttattcaatagattattcagaggtatacagagacaaattactgaaaaaggcaaaagaatatggcttcgattcaattaagcagctaagagaccatttgaaggaacaaatagatatgcaaaagatagaatttaataaaaatgacccactggaagaattaaataaatccaaacaatcgaatccaaggagtaattgtatcaccaccaagataagagaccctcttaaaaaatcatcagatcacaacaatagtaaatcacacaatagttttatccctttcaagactttggattcttatatggacttaagtaaattaaagtctttaacttctcaacaaattgaatatctatggagagctaaatggtctactaaggattcttcattggttgctgttgtcccgaatggtgtattcgaaaaattctatcaagttgctaaagagaatcctgtctttgtactaccgttaccaagaaaattgaataatgaaaaaggtcataataatattacttcaaaggaaaaggacaacgataaagataacgtttctgatgaaggtatggaattgcactatattcagtggagctttcctgattcaaatacctcgcactgtatcttgacaagtctagcagaatataagttacataaccaatttgccagacctcatactgttttggaattccattctgagttaagtggcgatatggggctagttttaatgaagggccaagtagaggatgattgcaatgtaacattacaggatgcccattatctcttattaaacattcaaagattttatggtgcaatgggtactcaatcaaagataagtcaagaaagattagatctattgaaacaatttaacagaggctcaaaagccttcaatgttgatagacttatcgaattatcacaatctatggaaaattaatattttgaaaagtatacacacatacgcatacacctatctatctatatatatatgtatttttcttgtaaataactacatatcagcttttttcccacataagactaaatttacatattaaatttatcagtagatctagattattcctcatacaattcatagacagtagcatagaaaaatataataaaaaaatcgtcatctatggaggccttgcttccataacctattcaaaaagttagctttaaccaatttatctcttattttttgttcatttgttgctacaatgaattattatacgcattttatatttggatagcttacccttttaatttaagcttatctttttgtttttcaatcatgactcatatattatcaaaaatcatctttaaaaaacaaaactatcattatatgtattttcatactcactgacctctgtattaatttacattaggtagttacaattgaataactttcaatgaaatacgattcaaaagagaaaacatttctaaattattcatctccaaataatctacccatcagacaatgtctcctacacgtgtgatttttttaggtcctaaaggtacctattctcatcaagctgctttacaacaattcagtgatgagggttctacagttgaatatattccaacacaatctatcccgcaatgcttcaatgatctagaaaataataaagacatctcttactctgtggttcctttagaaaattcaacaaatggacaagtcgtgtattctttcgatttattaagagataaaatgctacaaaaggatacttcaaggataggtaaaagagtagttcctgatttagaagttgttggagaacagtacgtgtcaatctcacactgtttattgtcttcgtctacttcaatctcatctataaacgatttatcgacttataaaaatatcaaaatttattctcatccacaagtctggggccaagtatcaaattatttaaataaattgaaatcaatatgtggtactattcaattgcttgatgctgattcaacttccaacgctgtgattttagcaaaggcagaacaagataatttggatccgaccaacaaagatacaatatatttatctattgcaggggaaacagctgcttttttggatcatgttaatattattgaacgttccatcaatgatattgttggaaataccacccgatttcttgttttaaagagaacaaatcacaagattgaacctaaagaaactggcaattcaaatggatcagtcaacgtcagcttattaaccttcaccatagaacaagatgagcctgggtctttggtggacgtgctgaacattttaaaagaacattctgtaaatatgtcatctattcattccagaccatataatagtactacatcaccaagaaaatggcagtatgtgttttttatagaatatacattcaaccatgataagacagatattgacttgttttataaacaatttgatgagaaatgtcttcaatggtgtttatggggtattttcccaagaaatgaaagatattaccaatagttctccttttctcaatttttttctagctgagtatgaatggcatgctctctcatccatcaactgataaaaatatcttgttaaacactattacaacaaatatctgtctcaacttcagaatacttaaactaccatcaattaaagaaaaaaaaacttgagtatatagcaaagaaaaattgttattttgatatgtgtaaaaataagaaaaaaaaatctattaataaaattttattacttgtgggatatcattataataattggcacatttctaataaatcctattgcttaaactcatttggataaacgatagctttttgaatatttctgttacattgacataatttacgaagtaattttactattaaatatacattactttccttttgctaaattaaacaattttaacacaccaacatattgaatatgatttaaaatatcagtataatatataagagacagaaataaaatataattatatttaacagtgtcaacaactgtgggattccttgtttgatttgttcactgagactttttttttatctgtactttcaatccaataatttaactagtaacaggaaattgaatagatatgaatgaaccaggaatggattcaataatattaatagatgacggtccagagagtataacatcaccctactcttccaaaagagatctccattcaactcaaagtaatagtcaccctgttgttttacaaaaaccattgataatccctatattattatgtctaatcatctcctttggagggtttatctttggttgggacgtgggaacgattggtggtataatcaatatgaaatcattcaaaaatcactttggaactatatataatacagaatcaatggaaattgacttccctgatatactaaccggtcttatcatatcaatttttaacataggtggagctctaggtggaatattcctagcaaaacttggcgattacataggaagaaaattgggaataactttagctaccacaatttatatgctaggaatcttcattcaaatcatcaatgatcaagtatggtaccaattcatgataggaagggttatatgtggcttaggtgttggttgtaatgctgtcttagtaccaatgtttatatccgaaagtgctccaattaacattaggggtgcaatggtggtcctctttcaggtcctagtaacttttggtatcttagtaggaaatataacaaatttcttctgtgtaacatacttcaatgactctaattactcctggggtattcctacaactctaggtttgctatgggctgccatattattagttgggctaatatttgttccagagtcagctgaatatttagcaatccaaaaaatgaatgaggatagtgccagactgtcatttgctaagatgaatggtatttccgtataccatcataaaaccgatgattttcttaacaatatgcaagataaattatttttatcaactcaagaaaggataaataggaaaaaatggcatgaatttatttctggaagtcccaaattgggattacgtgtattgataggcgtactattaatggcatttcaacaactgtcaggtattaattactttttttattatggaactatgctatttggaaaagcaggtatgagtaatccttatactgcggctatgatattgtctagtgtcaattttttatctacatttgctggcatttatcttgttgaatcatgggggagaaaattctctttatttgttggctcaatagggatgtttatttgtatgacgctatactcaagtattgggagtttttttctaagcaatgagaaagcagtttggggaatgattatagtaacatgcgcttatattgttttctttgctactacatctggaccagtcacatttgttgttgtttctgaattataccccattagaactagagcactatcgatggctctttgttctgctactaattggatagttaatttttttatctctttattaataccagtattaacaaaaaatatggatttttttctaggatatatcttttcattcttcttatttatatcaatattctttatttggtttatggtacctgaaactaaaggaaaaaataacgatcaaattgatttcatgtttagttccattaaaaatgagttagttgatccgttaaaaccagatcgatatggtaatgaatattactaatcaattagagaatcattataataaaccagatattctggctctaactaagtactattctttgtttatttatctatatatttattcatttgcatatctaattatatgatatgtgtaacatttgttaatttacattattatttttttttgttgtccttcatatggtacttagtcatagacttattagctttatttatacttttttcttactaagtgcaaaataaaaatatgtaattgattctttctttttaacattaattaaataaaatcattcttttttaaaaactgtttaattacatcccaataaccatcctgtaggatggtatcattgtgatgtccaaatggaaattcgaaaatacgttttaaagtcgatggacataattcgtataattgtctcatatgactaggtggtacaatttcatcttttaatcctcttaaaaataaaaatggtgtatttgtattacaatttggaattaatccttcagagttccaaatttcatgacacataaacgccactgattttaaatacgggaacatatatggaatgacctttctaatacttaaaaatgtgttctctagtataacaccatccacaagttcaggatactttgatgcaatatatatagcattggcaccacctagtgaacgaccataaagaaccaattgtttatttttatgaaaattattagtggccaaatatgatatagcacgatcagcatctaatttcagacctttttcactgggagaaccttcagagaacccatatcccctgtaagaataaataaacacactcattcccaattggcgataaaacagttctacaataggaatgaaaaacccaatattcccagcattaggacacaatataagtactgtagacttagaattttcgttctgcaagtcataagcctcaatcttaaccctatctgctgtagttaacaaaaccctttcatagggcaaacctctaatagcgggagtatctacatgttttcttgcattttgagcccatgacgggtagaccaacttattctgaaatatatataatgttgctaatgttattgttgagagagtaatagtgcctacaacaaactttcgaatataattcattaacatggtgcagcaaagtatgaagagattgttaaaaacctagaggattattaaccaaatataaaaaaaaatttgcaaaggagcatgagagttaaataactttctgctgttattaggcttctgtaagtatgccaacattcactttctttcatccctctacttttaataccattcccactatcattttccaacctgctttctcctttttaatctttgcatatttcttgatctcggggttaattttgttcatcctgacttcaaaaatctctcgaagaaaactaataatgaaatgtaatcaacataacagtaaaaaataatcatactatatatatatatatgtgtgtgtgtgtgtgtgtatccacacttaaaaagatagctatatttaatctatatttagtaacagttatatatttcttggatcaaaggaaccatcatttaaaatgccttggtaaaaaaatcccaacatgacaattacatagataagaatcaacattgaacctttaaagtaattagatttgccctctgcatacagatacgtaaacataaatatgcctgcaaaggagccaataagatcccatttaggaaatattagtgtaaacatttgtttcttgatgtttatgtcttgacgtgatatattccatgtataaatgattgagtataaaattaaagctggaatctgcaattgacacacttgcaaagcataagcagtaccaatttccattgaaagtgctacattaccatgtacagcaaaggaaatagcattcaaaaattcagtagtattgggaactaaagcaaagatagtcagacctaagaattttggacttagaccagggaaatcctctaagacagaatccacacaggcaacaagtatctctgcaatcactgcgtatagtactgtggcaatcaaaagaatatatgttgatttagatctagaccaatttggtgcctcatggccttcatgtgctagatttctgtcgttctctaaacaatgttcaccatcttcaatattgacagaactttcttttatctgttctgtaataggtagttcccaaattaattttgcatgtgttcttaaagtaaaccataatccaataatgtaagccaagaatagcacaattgcgcatgaaatggacataggttgaataatatctgtatacatattatcatatcttaatggtggatgtctaaaataacattgatctgaaaatatggccatggtggcacttttcatagttaaaccatacacagtattattgttgttgttactgttgtgattactgtttccattatccatacatattacggtatactctccatatatttcataaattattgttggtgcgtataacacgattgttgaaaagatcaataatgcagatgaaacacctgcactggctggattatatctttgcgtctttctgttccatgcaccaccacacatggataacccaggtaataaaagaactgcaccaagaatggaaccaattatggagccttccactaagggaccttcaccttttttcaaagcgatacaatatagatatatttccactatagttgagaagaatgcgttgatgactgcaccaacacccatagaggtctgtgcggatatggatgctacagcttgaccaatataaaaggccaatggaataattgatgataagcaaaggataaagatacttgattcatctgttaaccaagtgtggttgatgttaaagtatgatttcaacacaaaaaaatcgaatattgtgaaaaacaccaagaatattaaatttaccactatgacatttgtaccatctacagtaaatttgtaataatgccatcctgcacaacgaaaggtacataacaggatatttttattcgttccattatcaacgttattcagggtagtggatgaattttgcaaattcttaaaacctaatgctaaaggatgtttccttaaatggtataataaattccatagaatattactcatgggaatagtgaacacaaatagccatgtgatcagtgcgaagagcatgacgatgggttctaatattaggtggaaaagtgtataaaagatgattctaccaagtgtccattcacctctaccaaaaaatcttctttgttgtaatgtgctattttcaacaggtgagttagcagagtgattaaggttaagattattggcaaaagtggtagagttatgtgttttactactaccgggcaccacagtttgttgttgattatttgaaagagggatagagccatacgaaggatactgtaatctttcattgctacttactgtgggggacaaagtttgagattgatggaaaaacaatctgttaccataggatgtgacccacttgtagaattgtggaacacttatcccctcacctctatcctctttcaaataatgttcatcttttaaaagaaagactactttaccgaatggccaaagcaaatatttagataaattgaaaaagactttagaataatttctggatgattgagtgaatccgcccaatatgaaaactaagatcgatgccattagaaagatgacaaataaggtcagacccatagtgagtgaccagagcacattggagagatgcacatagatgcttatatgtttaagtttagtttcatggatatcttcatctgcagctttttgtaccgatctttgttttttgtaaagagcaggtttccagattcttataccgaagggatgggttttattgattgcgtcttgtcgttcctttaaagtaaaggattcaatagaggaggctatagagacctgatcatcatcatcatcattattattattaatattattattgtttagttggttgattgcgtttagtagatttgattccaaatcttgatcatcagtgtaattggatgatagtgggatctcttgaatactcaaatcattattattattattattattattattattagttgtgctgttgttgctgtgattagtatttttgtggtcgtgaaaggaagtatcatgaacaatatatctatcggagatattgtctaaaagggcactagcagctatgatattattactaacaacattgttgttattattgttgctattgttgcctctcaatgaattaagattactctcagatatttcatgcttaatagaattatttaaatcaaaacctataccagaatctggagtagtcaaaatagcgagtttagatatactacgatgttgttttggtctagatccttgaacagttgtatttgtgacaggattagcaaggctaacagtagtgttattattattattatttaaaatgtctatatttggagctgatttgattgcagataatgcatttctagacttctgagtatgcaaagcgtagtggaacccatcatggagaccttctaggtaccgaatatcatgtttaacttcttctggatcgtcatctacactaaatattcttgttccatggatattttcctgtataattggtgtggtttgagatatgttctttttggatttcaccactaccgaagaagtatcaggtggttcagtggatgaatcatccatgatgcaataaaataaaataaaatacaataaaataaaataaaatacaatataatacaatataataaaataataaaaaagatataaaaaaacaaagaaaaaaaatagagtagaggaaaagaaaaaatgtatgttttaatgggtttaaaatagtcagattagatttgattagatcttatctcatatgaggtatagatataggtggtaatgaaagtagtgtttactagtatcaactactatctatagtaattacttgctacttaccactgctctctaatgtactgtagtgccagatgtcaaacccatcaagtcaaatccctttagatcaaacgaaatgcagaaaccgtaaacaaaaacaggaaaagatatacaaaataggagaagccaaacaaaacaggaaaacagttatccaaagaggaaacgatcctaacacatacctctgtcattctgcacgacgtagcgaacagcacaaattgctccccgcaccaagagaccaaacgctggcgccgtcggggagagacgcaaaaaaaaaataaaataaaagaatgaaactctgtggtgtctgggtcttgcttctttttttttgcttttttggcgtcgttgttttggaaaaaaagaaataaacagaaaaaagaaaaaagaaacccagaaggtaaaaaagaaaaagagactttggacttcgaaagagagttggaagttgagtggtatagaggaccttgtgtgtgtgtgtgtgtgtgtgtatccttctattcattctttgtagtccacgacctgttatctgtgagtaatagatatacatatacacacatatacacatccatctaatcatacatacatacactcaagtatattcatatttatacttatttttatacttttatatttttataatcccatccgatattgttagcttttgttctattctactgatccgtcgcttatccatagctagtacagaaaacattatatatccgtgagacatgagactaaatctactttcatttctcctgattattccatacgttctttctgctttagtcacagactacatcgtcactactaacgtggctggtgtcgtatctaccatgactagtatatatgatccggaagataaaataacgaaaactaaaaagaccaccaaacttacaacaccacttataactacttccactaccacacctatcacacctacaacacccgttactactgctattactactgctactagtaaatctagtaaatctagtaaatctactaaacctactacacctgctactacagcaaccactaagcctaccaccactaccaaacctatcaccactggcatggtaactgctgttattacttctagtttggataatggtgctttgaccacatataccaccgttattccattagcttctttcagtaccacctcttacgtcaattcaagacatagaccagacccaagcacttcagtgaccccagaacctcttacccccgtgaccactttatcttggcaaagttgggccaccatcactgagggtgataccacatacaccacaagtttgtctccaatcatcatctggattactgtcaccactaatggtgccttggctacaatttctacaacgtatatccaaaggttcagtacccagtactcgactattgctcaaccaagttctggatccattggattaggcacaatatctggtgaagttggtgtggtcaagcctgaacatctaactacaatcaagtataataatgcatttattctacaagcaagtcatccaatattatccatttgtgcaattttgttatcatggttattatgaaaaataaaatagtaataatagtaataatatgtataaaaaaaaaaagacaaaagaaaaatacatagcatttattattccttttccactttgttctccttttatataatgctactatagatagataaacaaactctatatatcctttcaagtctgttataaaataaaacaagttgtgttcactggtattttccttcctgaatcatttacttttactttctatattttttatttatttattttttgaaaaaacttattgatcaacaatataacaaaaaagatcaaagaatagaatacagtcacgagagtgaagaaccagattatacaaacatttaaataattcctatatatgcatcttaatcgactaaactattgtgtttattcatactgggctgtttcttcttcttcttcttcttcatttttatttttgttcttgatgtgatttggtccataatggatgatgtaaccattgaaaataatgagaaacaaagtattgctactaatataataactaatagcacgcaaccactctccttagtgacagaactgaaacattccaatgtactaagagataataatgatatcactaataatgtatctaatgctaatgaatctttaggcgcaaacctaacacccttattatcccctacgctaaatattatcaatcaagacactaatgacaggactaatacttttgttaatgatactactaccaccaccacagcaacgactaatacaactattaataataataataataataataataataataataataataataataataatgaccatggtatcactaatgatgctccaaaacagaaaaagacaagtaaattcatcttatctaaatttacattgtacgaaactaaggatagaatgtatgtagttgggtcaaataaaagagaatcaatgtttagaattcttgagatcgatttgaccatggatgatttaaccgtattggaagatccaaacgtatttttcactagaaatgaaattattgatgtcttagcagaattagaaaattctagtgaaggtggattacataaaaaactgactggatatgccttattagggtttattagattcacgtcatgttactaccttgtcattgtcactaagctcagacaggtagctgtcatcggtggacattctatattccatatagatggtactgagttgattcccatttcaaataactataaaaaacctgataaatattctaatgaatctaaattgatgagtactttccaaaatttggatctcactaaaactttctatttcagttatacctacgatattaccaataccttacagactaatcttttgagagaaaaattgaaagctgttaacagattagacatctctattccttcagggataccaaattataatgaaatgttcatgtggaataaatttcttttgctacccctctttaattgcataacgactgtatacgattggtttcaatgtattatccatggatttattgatcaagtcaacgttccaaccttgggtaaaaacatatatatcactttgattgcaagaagatcccatcattttgctggtgccagattcttgaaaaggggtgttaacacgtatggatatgttgcaaacgaagtagagaccgagcaaatcgtcattgatatgtcactgactccttttcatcaatcaggtcaaggttattttgatagtgatcggtacacttcatttgtacaacatagaggttcaataccattatactggattcaagaagcatctaacctaacagctaaacccccaatcaaaataaatgtagttgatccattttttagtcccgctgcattgcattttgatagattgtttcaaaggtacggtggcgggactattcaaatcctaaatttaatcaaaacaaaagaaaagacaccaagggagactaaattgttgaaggaattcgagcaatgtatcacatatttaaataaacagttacctgaaacgaaaaagattgattacatttcttgggatatgagcagagcatcaaaacagaacggccaaaaggttattgaatttttggaaacatatgctttaagaagtgtttcggaaactggaatattccataattattcgacttttagagacactaaattacaagaaggaatatgtagaagtaattgcattgattgtttagataggactaatgcagcacaatttgtcattggaaaaagagctcttggtgttcagttacaagctttaggtataatagatgatagttatctggaatatgattctgatatagtaaatatcctaactgaactatttcatgatcttggtgatactattgcattgcaatatggtggatcacatttagttaacacaatggagacatatagaaagataaatcaatggagctcacattcaagagacatggttgagagcattaaaaggttttatagtaattcatttatggactctcaaagacaagatgctataaatttgtttctaggtaattatatttggaaagaaaatgaaccacctatttgggaattaaatacagatttttatcttcataatgaatctaaatccatgggacctaagagaagctatacgcattggtggaatgaatatcatataaaaagtattagagaattaattaaagaagaaattattgaaaaatataacgacattacaatagagaaaattagagtcaatatacgtggatttcctgatgcatttgataattattggaatgaatattatttaccaagaagtttaacctggattacagatttgtttacctacaatatgaattctacgagaagatatcaacatttaatgagtctggataaaaataataatgatactagtaaatctaacgttggtgaaagtaaccagaggagtaaaatatatgaaggtggtaatcatagtgacagtcataatcaatatagtaatagtgatatgaccatgaattctccatttgtttctagaaaacaaagttggattaataaaagattaaggactctactagttgcagaagaagagaagtgtaaaagaaaaatcattataacagaacaacagccaaagaaggacgtaactagaaatgatgaaatagaattatcgttacattgcttgaataaattgattgataatgaacaacaaataaaatctagcttgtttgatttatcgcatcgtgaaatacctattttattatcgtctttgacattaaatgataattatgatggagtatcgcaaagatcattatcatcattttctcctactaactcattagcagacacccctcacaaaatgaacattaatgatgtatatccatttaaatgtatttctgctgatccgcaaggctgtagttttgatttatcacagatgaatttgaatgccttaaaacctctagaagattataatcaggtgatacatagtattcttaaggcgacagttaatgaggctgatttccaactgtaccataattcaattaaaatggcaaataatgattttatttttgttggctaggctaaataagtcttagagttatttacgtactggtatataatcaattgttttgttaataatatacatattcatatttacagattacatgggaagggactagcgattcttcttacagtaatttccatattttgcatgtaatatgaggacctgtcaagttttttattcttcgagaggataataagcaatatgaaaaaaaaaaaaattagtacatctaaaccaaagctttaaaaaaaataaaaagtggatgctagagaataacacatctacactataaccatacaaacataagacatcctcgtcactttatataattgatcttgacgagtggcaagtttgtattattgtaaagtctatcaggttaataccgagaaacaaaaatgtattagttgaaaatgtcatgggtagcgaagctgagtaaattatttcccaaatgcctgacggtcattttatttatatggacataccatgtcactttaacgagggttgttggtatcccacggggtattttattcatatttctaactttgggagttttgattgcattatacacttattttaaagttatacaggttggaccaggatatccgatggattttttggatttaaaagtcaataatcttcatgaagtagaatcaggtaatgaattaccaccagtatatatttccagaaaatcaataacgataaaacacaatggaagatttagagtgtgtcaaagttgtaagtgctggaaacctgatcgatgccatcattgttccacctgtgaaaaatgtgtgttgaaaatggatcatcattgtccctggtttgcaagttgtattggatttaacaatcaaaaattttttatccagtttctaatttacacttcatcatatgctctgatagtgacaagtcttactttcttccagttatataggtggttcaaggggaaacaatttgaagaagagatcattgaccttcaattattatctgcttggcttgtaggtgttgctgtttctgtgtcagtgacatttttcactgggtttagtatatatcagttgtgccaaaatcaaactactatagaaacatacagtctaagacgttataaagaagagatccgtattttacatggtgatgtacaatcaacaaacgattataatcttttcaatttaggttctgcctgtgaaaattggaaagatgtaatgggaacaacatggaaagaatggtgtttgccaatctccaagatcagaccgcaaacctgcataaatacactcgacaataaaggtttgtattttaaaatcaataatctcaaaaataatcaacttctagaaagtgcagaattacaagacagactacttagaagagtgactcctaaatcttcattagatgttgagaggccactaattaattaataatttttaagaacttgtaagtatcaatattgaatataagtagttaagaatgaaatgtattataaaattgttcatgttacaaatatatgtacataaatatatagggatataaatgttaaagatattgtcctctaattgaaaagattatcatttctattaatgcaaaaagtggtttcagaaccaacaaaagaaaaaaaaccaaaaagtgataacaactagtgctgttataagaactaaaataaaataaaaggaagccccgaagaaaaccaataaaaattggatgagtcaatcaacaaaagaaaaaactgattaaataattacaccttacttagaataatagagcaagtaaagtgataaagaagcagctaatactggaaactaatttgtttgaacctgcttcatatggaacgacagacattgtagtatgagtgaaatttgaatattgagctatttcactttgaatcaaaggaacagccatagaaatggatattgactggttagcatcagaagaagaggaagcaggtttaatcgtagctgtggttttaagaatggatgtcgatcttgttaagacatccaaagcagtattgattatagttggcgattggtgttcattttcagtagataaagctgcaacttgaactagactgctgtacactgaattaattggtaaaagagtagtagtcgatacaacttttccaacttgtgtggaagtacttgataaagcaatagtcttattacgaattgtagcaatggcagcaaagtcagtagcaactgattcgagtccattttgaatctttgtaataacagtaaaagaggcttcagtggaacaggagatagtggtagtcaaattatagattcttgtaattgcggcaaattctgtgtaaactgatttaatggctgtcatagttttagtcaccaaagagccagacacctcagtttggtaaacgttaataacatttccgttagataaggtagatattggaatcaaatcagtctctacggaataatcaccagacaaagttttacttataacaacaccgttaacaattattgtatacaagtcatttgaactagcattaaaggtagaattggataaaactgaggtagtttgtttatttgttgaatcgatagtggcaccagttgtagcaatggttgtttcgtaagactttgcagtcatgatttcagaatcttttgtggtactggtagtggaaacaactgaagaaatatcagtaacagtggaggcaatatttatgctgttggaggtaaaagtattgacaattgaagttaaagaagtagcggataagtttgctttagagataatagaaacagaagttgctgttggttcaatggtagaaatagcgacataagagccaatctcagtaactacggcactatttgttgtagtgtaaactttgtaagtcataacaacattattggatgtaactaaagatggtagagaagtggtgtttgagaaaaaggtggtattagaagaagggaaagaagaagaagataaggaagaggaggaggaaaaggaggaaggaacagatgtgataatagaagaagaattattgctagttgtagtgattaatccagatgaaagtctcataaaaatatcatttacatcagaatcaaatgttggtgaagttgtgtatgaggtggaggcaatgtatgatggagtagatgtataagtgttattagaatacaaaggagttgagatataaccagtagacatggaaatggaagtggtagaaacagaagatacaatgacactattgttagtttcggtgccaatattaccgccatagatagtaccagtgatagagtctgttaaatctctctttttcaaagagttagattggattaatttagcagaataagagattggagtcttactcaatttagtggtgaaataatagacacgaacaaacttagcagatccactaatcattgtatcgattaaaatttcaatttgattagttgtagacttatcagtgtaagcagtgaaagggacacttttcaaaggattaccttgagaatctacactagtgacagcttccaatttggtagcacttatattaaaggagtattcgttagcaccggtcttaacagacttgaaagtgatagcttttctcaatagagagattggaatatcggcaataaaccaagcagtgttattattggaggaatacccaccattagttgtcaatgaatcagaggttttacctaagaaatagatctttgaattaaatatgttctttgttgatgttgtaaaggagaaagtgatattttcacctaatttaatggaattgatagttgaattgctcaacttagtcaaaatattgaaattgatggtagtatcttgcgagaaagaatttgggaaattgattccaacaacgttatttcccttttcatagatagaggcgacgatttgaccattgttagagatatttagaggtaaagttgggaaagagtcgaattgggaaggaacattaaaatagacatcgtctttataagagcttttacttatggataattgggtttcaataaggaaaaaatgtgccggatctgtacagttttgggttttagtgtaagagtctataagtttgatatttgtgaaacaaatatttttaccgaatgcaattgatatgagtagaaaatgtaataaaaacgttatacttgtgagcatttttgatattgggaatgtatatatggatatttatataaatagattattttcgttgattgattgattgattgctcagacttaattattcaagagttttttttttttaaagtaaaaaaacaaaaagaatgagagacatccattaagcaaggaacaaatgatgtttagcatatatatgtttgactccatcatctttaaatacttttttttttttttgctttggatacttgatcgatttagtttaagtttagaatcacaacactctaatactttctacaaaagcaaaaataaaatagggtaaagtaaaagatttgtttagctaactcatctaatagtattaaataaaatagcccagaaaaagcacagctttacaatgttaactatctttagggtcttgagaactaggaaggagaggaaaagatttttcattgaaaagaaaataataatagttcaaaagctacttattcaggtcaacaaatattttaaaaggttaagagaaaacaattgtatgtatcttaacttggaatcttcagtaaacaggattaacataaagacaagagtagtaataataataagaagaagaagaagaagaagaagcttagaggatatctaccattttgtgacaccagcaaaagccaagcaaggcacaaagttgcctgcctttcttaaatgctccaaaagaggaaactgggcctatgctgggcaaaccactgcgtttttccgttttttcttctcttttcttttcttttttttttttattttattgattaactcgcctcaagcaagacgtgcaccggatttcctatttcggtcatgcaattgaaaaactccgaacaaacacgtgcaaaaacccatacacttaccaactactaggggaatgggaggataaataggaaaaaggcaaaaacagtcgaaaatggcaaagaacaaagagtcacaaaacaatagagatgatactttgaaacaataccaggtagaggagaaccaagaataataacaatagcaacaatagcagtaataataataataataaataacggtacgtagtgttgttagtctcaaaattgctacaattgaagttagttacgttttcctaagctggttcaaataatagaggttttgaagtcagtttaagcataacagttatacgtcaatgaacacagagtttaccaacaaagtaaagtctatttctgtctctgcagaaatctcaagtcctaacagtttaacatggataacaaataagagagagaaagagcgaaggcatagagactattaactttgtttaatgtaatttgttttttgtttctctctaagagaacttctcccttatctccttgagcatatctgagacctgccaccacactgaattatgttccatatcatctataattggatttccactattgactaacacccatctgtctagaaccaaagaaaagaaatatagactaaaaaacatgggagaaagaagaaaaaaaaaaccaaaaaaaaagaaagaaagatattgcgtaaaatctataatagacaagaaaagaagatggggtctatagagtaagaagaaaaaccaaaatgtattacaaaatatccatcgatactggcttctatttcttaatgatcttgattccggtaattcttatacagaaagttgtatatatcttattttttttttttaatattttgaatatttgttattcacattgaatacatagattatattgtagtgtatcgtattgtagtatactacattgtcctagtgatcatttttaatttgacatgaaatggttctccccatattaattggatgtggagtcacagttttagcattatcaatacaatcttcattcagagcttggaacgtatacaaaacattgactccaatcacaattgcaaaattgaatggaatcaaatttaatcaagtccattccgatctctctagtgatccaaggttcttaagtaacaacataaaccccatcctaagaaaaaacttggaacaatactatggcgggttcggtcatatcatgaatgagtctgaagcattgttgatcttaaatatttcttccgaagagattaaagatttggattcagagatgttgaaaagaaaatacaggaaagccttgatattgaatcatccagataaaggggggagtccatatgtgactacaaagattaacgaggcaagagaattgctgtttaatagtgtactggtgcgtaagcaatgatcatataatagaagatagaacaaaatattatatcatgcaaatatacgtatatacatgcgttcatacatattaatattcaatataacagacaagtcgcaactctttatcactatattgctctccaataaatgtttgtatatttgttttttatgtactttttatcttctttgtaacatttgaaatatataccccttctccctatcctttacattttttttttgttattttatctttatttagttgttttattttcttatatatgttaaaacaacaaagattaaaccaaatcctccacaacctttacaagttttgagagtgcaacgtagctgtcaaatcttatttttttcttactttttttttcatttctatctattattaaatagaaaggtgtatgtagtagcagtaataagtacggttagtgaaaacgtgtgcaggatctatatttgttttccctaaatgataagtgcgaatctattaattgatcacaatgatggaatttatcaatgccaagtttcagatgacatatttgactatttaatagaaccttcccaagagaaaaatgatcataggacagcatactgcaagttaaaatatttaatttactccaataataatccttccagctttattgttaactgtaagggggattcaaccctaccaattaaccatatacgtttaaaagacacgctattagatgttacaacaaacgatacttttattatcaatacatgtcaaattgaaaagttggatcttgagagcacgaccatacctattttaaaagaagtaactttattattcaatccttctctatacaatatattaatacaattaccagattcaaaagatattatggaatttgtctcaaagaagtttggtgtggaagaaaataaaacaataatccattctggcaagtttttgtcctataaatggtgcaaaactattaatacaaaaccttgtttacaaggtatagtagattttaataaaactaaattcattatcgtgagtgatacaataggtacacaattcattgccaagcaaccattgttattgaatccagacttggagattggcataaagacatctttaaatgtgtctttaaagtgcttggaacataaaaggtatcaagatttaatattatgtaacaatggaactctcgaaaaaagtgttgacaaatctttggttatattgactgatagaagcattttaattcaattagatcttgttgacggttcgtatgttgaattatcaaatattgatagcaaccagaaggtcatttcaaatatatttgcatttattgaacctcacaagatggatctatctacagtatatgtatcaccaagattaaaaatgcaattcagagatacaaatcaatgtattcttaaaaagtcatcatttagtattaaggatattcctttagccaaagagataatattgacaagagtcaatgacatgtaccagaatgaaaaaatatatcaaaatataatttctaaagagattaaggatttttttgtgaaagaaccacggctaattaaaagaaatgagctaattccaataacttttgattcgacacttactatgctaccaaatagctatgatcaattagagaatttaaacttgaattctcattccaagcatgattgtattacatggttcaaaatagcagatatcagttccaatgaggaagatgatggcataaatttagaaaaagatgctaaatctatatttgattctgatattaactattatagagttgatccattagaaaatgttaaattggtaagcgaaaatgttgtttatgaaaaacctttcgctttaaaacagtgtgattatatatcgtattatgatttaccaccaatatttaattataatctgaaacatttcccctacgcagcaaaacttcttaaaattgttaattcaacagttgattgcattcaaaaaggtattccaatgaaaatatcgattatggttcattctactaggacaagctcaggaaaaaatacattgataagatggttatccttagagttgggaataaatctgatttcattcgattgtcgtcaaattatatctagcatagcttcttctgattcaatttcaaaaattctcggcactataaaggctaagataagtaataacatacatatgacaaatatatcaacgattgtttatattactcatttggaagaactattcactaaagttgacccaaatcaagattcaatcacttttaaattatctacttctttggaaacagaatttctgaatattatagaaaaatctatggaaactaataagcacatcatatttgtttattcatcaaataacatcgaaaatatccccagtaaaattagaagtaagattaattttgagataaaagtacctgttcctactgaaagccaaagaaaggatatctttcaatggtatctttctgtagatagattgaattctgattgtttaaaaaatgaagattcatccattcggtttattcaaagtagcgatattgatttgagtcaattagctatccactctgcaggtttaacaccactggatatcaaatatatagttcaaaaggctagagctgcatcctataatgatataatgggaagaaacagtccatatgatatgttactttggaatcattataccatatcagtatctatggaaaaattaaaagaatctatatcttttactcgtggtgatttttctatatccattggcgcaccaaagattcctaatgttacttgggatgatataggtggtgttgatataataaagggagaaatcatggatactatagatatgccattacgacatcctgaattgttccgttcaggttccaaacaaagaagtggtatattgttttacggaccacctggtactgggaagacactaatggctaaagcaattgctactaacttttctctgaattttttcagtgtaaagggtccagaattgttaaatatgtacattggtgaatcagaggctaatgttcgtcgtatatttcagaaggcaagagaggcaaaaccgtgtgttattttttttgatgagattgattctgtagcacctaaaagaggcaatcaaggggattcaggaggtgttatggatagaattgtgtctcagttattagccgaactggatggtatgacaggaaacggtgatggaatctttgtaattgcagcaacaaatcgtccagatttacttgatgaagcattgttaaggccgggaagatttgataagctgttatatttgggaatagctgatacgaacgagaagcagtataacatattaaaggcactgacaagaaaatttactttatctgaggatgtggatcttcatgagattgtagacatttgccccttcaattacacaggtgcagatttttatgcactttgttccgactctatgttaaatgccatgactcgtgcagccaagactgtggacagtaaagttgatcaatataataaaagtgctagtaaaaagttatccatacgacaatggtttgataaaattgctactaaagacgatattacggtgtctgttcgaatggaagattttcttaaagcacagtctgaattagttccaagcgtctctccagaggagtttagtcattatcttcaaattaaggaaaattttgaaggctaaattggctttcatttataagtgttccttttactaattattgaaccaatattttgttagcagtttgcttagtcatatttgaatatgatgcttactaattgttcttttttttttcttttttctttttccctttttctaaatttttccatgttaatccaaagactggcaaaaatttgagaaaaaagaaacgtttgaaaaaaggatttataatacgagcaaataaataacatgagtatagggagactaacgactgctatccctccttataaatacattaaagtcacttaagattattctttcaatagaaatcaaaaatatctatagttggtgacattcgaaaaaactacaaagatcgatccgaattaactgaacaaagcgtacgtacatttatctatctgatcataaaaaaaaaatggctgtaaagggtttaggacaacttgaccaggaatatgatggttcaaatttaaaaattggtattatacatgctcgttggaatcgtgttattattgatgctttagtggaaggtgctattaaaagaatgaagtttcttggtgtcaaagaagaaaatattattattgaaagtgttccaggttcatatgaattgccatggggtacgaaaagatttgttgacagacaaaagaaggagggcaaaccattagatgcagttattccaattggtgtactaataaaaggaagtacaatgcattttgaatatatctctgattcaactactcatgctttaatgaatttacaagaaaaggttgatttaccagtcatttttggtttgttaacttgtttgactgaagaacaagcatttgccagagctggtattgacgaagctaaaagtatgcataaccatggtgaagattggggtgctgctgctgttgagatggctactaaatttggtcctcaatgtccattctaaaaaatatataatgcttgataaatttgatgatatataaataaatagattctaatataaagaaggttaaataatttttgttgttctcttgtcactcttataattattaatcgttagtacagtactgtcaataatagtttatgcagttgctatattaaaatatagtatgtttaccttatatcatttaatgcttctactatttattttactgctatttaaatagttctatatagattagttactatatcataattatgttattattaccatcctttgcttgtcttttttttctttgccttaaggcatctcttcttctattcttcatctctttcatccattgacctctgttctcccaaaatagttcttcccacttagaccatatatcacgtttattcccagtttcaatttgagttaactgtgtttgaccaattaaaaatggcgaatcaaaatgaggaaagaataaacggttttgattacgtgtttgcaatataaaattcattgaattatcatttttatccttttcattgtactcattgataatgtcatctgtgatagctttactttggtcaatatcctcatcatcatcttgaatcaacttaaaagttttgtttatattatcatcagcgttattttttatatttaaagaagttggtaccttagctgtgtctggattaaataatgctctaagagtttcagtgttgctgatagtcccttggataggttcagacacttgttctgcttcatcttttgtgacatcaaatgttggaataaactcttcttcttcgctttccctttctgtctctatcctttcatcattctctttattcgaaaacccaaagacttcagcttcatcagagtcaacaactgttaatggtttatcgaaattcacttctcctaaaagctcatttaatatgttattattcttatatctttcttcttgtatcatttgttcttctaagtcaacttcttcttcttggttatttttattaggtttatcatttcttctattttcattactattgataagatttgaagtagtatttatttttgattcttgtttaatattatagtctgttagatttttatgagtcattgtctttcttgatctagtgtaatccaatctatcaataatatgattataattattccaccattttccattgacatattgatatgcaagatccttaacagtcttgtttctctcatagccccataatttgttcttatacaatttgtagacttttaatgacccattaacgtttattctaaacgtggggtttctcaactgagtacgtgatctttccgctttacgatatctccctggaataacttctttttggtccttccacgacatacgaatattttccaattttttataatgtctccactcctgtaatttattcagttttccaatcctcacatcttctgctaaatcattcttatgttgtaaattccacttgactttccaatcaggcttggctatatcaatcttcaatagattgcccttgaatttgacattatttaaactttgtttcaatttactaaaatctaaatcatcttcaaaatcaatgttaatatatgcaaatgtagtgaatttttcaaacccatcctctgaacacttaccaaacttatcaaatctagatttcaattcatccagacatgtatcataattatgaaatatgtttccaacaaatactctatgtgtcaccatctccaggtgtatataaaaatgtagttatatgaatatttaccttgttatgcttgtttattactccgcaaatgtatcgatttaatacaggatgggaagtgattgtatgataaataagtatacatatatgttatattctatacaatagttgaataaatatcgtgaagctcatcgcatataaaaagtttttgagaaagaaaaaaatttcagaatctcaaaaaatatgttaccctgaaaaaacctaaaaaatttcaaattatccagaaataaataaaaagagtaaagatgctaaaacataacttattaatgaatcacccaagtgtgtgtcaaggaaaaaaggaatttgtatctagcataaacacttggttcactttgccaactatattgctgacactactgaaagactttctgatagtttagacattaaaaatacgataaaagtgaacgagttatagattaaaacagtcagtaatagaaggtagaaagcaaaatagagatcatggaaactacatataattctaatggtcctttagaggcttatcctattgttgaatggcctagagtattggatattccattaagagcttctgaagaattagtgagtattgatttagaaacagatttgcctgaggattctgctgacctgaagactcttcttgtagaagagagttcagataaagagcattggttgactattgctattgcgtattgtaatcaaggtcgcattgagcaaggtataaaattagttaatatagctttagaagtctttgaaggttccttaaaagcatcattatacacatttttatgttgggcctatttaaggttggctaaatccacaaaagatacctctcaaagagataaatatttacaacaagcggaaaatgaattgaaaaatgctattgggttagatgcatcttggataggtaatatgttagctacagtagatctatactatcagaagggtgattacgataaagctttagagacaactgatattttcattaaaagtacacaagctaaggaacgcagactaggagggcctccaaggattaattgtatgtttcttttaacaagagctaagttactttatcaaaagaaaaattatgtagctagtttacattcctttcaagaattattagtatcaaatccaatgtttaaaccagaccctcgtattggtatcggattgtgcttttggaaattgaaagattttaaaatggcaattcaatcttggcaaagagcatacgacctgaacccaaagaataagaacctttctatattggtgcttttaggtaaatttcatgagactattgtcaattcagaaagtgatatggcttttaaagaaagttttacacaagcattaagtgaacttaatactctcttagagtctgataaagattcaccagtgctattgtcccttttacaacaatattattattttcaaaaagattatacccgtgtaattagaatatatgaatcaaaaattgagccaaaaagacaagtgattgattcacttatcttttccgaatctacattttggtgtgcaagggcatattatgcaatggaggattatcgtaaatcttttcttttatttaatgaaagtctgaagatgaatgaagataacctattagcaaaaatcggggttggccaatcacaaattaaaactaatttagtagaagaaagtataataaagttcgagaatatttataaaggtaacgaaaatattcaagaactgaattatattctaggtttgctttattcaaacaaagtgtttaaacaaacagatcaaaaaatgaatcgtggtaaagaatttaattctttagttactaaggcactacaatttttggaaagatacgtaaacttgacattggccaagaaaaatcagttagttatccccaaggcgtatttagttatatcacaattatatgaattgcaaaatcattataagaaatcgttagagtatttgtctaaagttagcgaacaaacattgtttgttaataattctgaggaaagcaagattccaattgaaattttaaataatttaggctgcttccatttcattataggagaatctgaaaaagctaaggattattttactaaaagtaaatctttattatctagcaatgttgtcgaagatggtgtatatgccaattcactaaatattacaactgatttcaatattgcaagaatcacagaagagaccagtccaaaggatgcagaaatactttattcatctattatcaaagagcatccaagttatattggagcaaaagtgaaatatcttttctgtaagtttattactactaaggaatcaaatacagatgagactttaatgaaagatattgaaaatttggtttctaaatatcaaagtaatttggaagttagatcattttatacttggtttttaaacaacgatgaatcaagatctaaaaagaccttaaatacactattaactgaacacaataaggaaactttgactaagtatgattctcatgatttatatgcattaatatcattagccaatctatatttgattattgcacgcgatttgaaaaagacacagtctcccaaagatatggataagtcaaagcaatctttattaaaggcaattcaactatatcaaaaggttttacaaattgatccattaaattgttatgcagcacagggaattgccatttgctttgctcaaagtaaaagattaggtccagcattagaggtattaagaaaggttagagattccataaataacgctaatgttcatatcaatctatcaaattgtttgttagaaatgaatgaatattcaaaagctattgaaaattatgaaattgtattaaagaaatatccagatattaagcttaaatcatacatattaaatcttttaggtaaagcctggtatcaaagagggttaaaagagcataatattgaatggtttatgaaatcattggcaaaagttaaggaatcaataaaatctatgaatatcaatgaaagaagcgctaaattattaagtgaattgaaatttaattgtgcacttttacagtttcaaatagctgaaacattgagaagatcaaatattaaaacacgtaaagtagaagatattaaatttgtattaaacgaattgaatgatgctattgtaattttaaaggagttgaaagaaaatgaatcttttaaggttgtatcaaaggacgaagtagaacaaagaattcaattgggtgagactaccatgaagagttctttagaacgttgtctagctgaacaaataaaatatgatgaagatattaaacacaaattagaagaagctaaaagacaagcggaattgaaagaagaagaagaaagacaaagattagctaagcttgaagaagagaggtccaaggaagaagcaagaaaagcagaagaatataagagattgcaagaagaagccaaaaaatatgttcaagaacgtgcagtgtatgaagagaaagaagaagttggagagagtgatgtggacagtgacttcaatgaaagtgagggaggtgaaaatgaaggtgaaaaaaaaaagagaaagagaaagagaagaagtgccaataccaagaagaaaattaataaaaaggatagagagagcgacagtgaggatctggacatagataatgattatgataatggtgacagtgatgaagagattaagactaagagagcaaagttacaaaagaagaactctgatccttctaaagattttattgatgatagtgatgaagaagcacaattctctaatgatgacgatgacgatgatgggctattttaaataggaacaaaacaaaaaataaggaaaacatagtattaaaagtgtaggtttttgactattgtattgtatcatattaatttatgtatgtatttatatacgtctatgaacatttttctttgaattaatattgatatatccatttcttgatatccttgtatgaatcattagcttctttatagatttttttctcaaattcatctaacgttagagtgaacagggcgtgattgttattggttgtattattattaccagtggagctagtgctattgctgttattattatacgatatagtggtactattagcatgagcattaataacttgagacctttgtaataacagatcactaactatttctgccaaatctttatcactaaataattcaatccatttgatggccagagcgtaaaaataagggttaatagaatgcaaatcaagggatattggatcggtcttgattgcattaataactttattagtaaaagtttccggtgtcagcatgttaagaaatggagtaaattgttgttcagtattaaaaatgtcagcatttccaacgtcatctgatgctgatgatgcatcgataatggctagaacacgagccagccatagaggtaacttcaactgggtattgacgtgaatcgtaccaccagggttattctccaaatagcctaaacctggaatatcatgtaaaaatttacatggaatttcagcagaatctgctaagatgtcatcaagatcatagtaacccatgtatagacaataaagaagttccttatattctttctgatcagatttgatttgtaaagtttagctatagtaaataggtaaggggaaacaaaggtgttagaaacaaaaatataatctcttatgagtagcagaggtcaatagacagacaaatgagtggcaaaaaaagttgctacagtcatataaaaaaactaaccaactattttctactggttctgcttctcttctcttctttttttttccattttttgtctttctctcttctgtgaaaaagtttacgtgtcttcttcttatttttttttttttcaattcttcgaggaaatggcgaaaatcttgaaagaagaataagagacaaaaaagaagaaagttattctgtcatgaaacaaaatataaaacacctgctttttcccattatttttcaacgagtgtgttgctgggttggatgtcaacgtgtgctcaagtgtttggaaattgttagtacttattcctctcttctttcactgcagtaattttttttgtttttaatataggagaatatgtccatgtcattctagcaaggttttgggacgcctaattgatgtcttttgaaggtcagaaggttgtgaaacgctgaaaaaggttcttctagtattcagtaaagttttgtttaattatattaaatattttattactagatgaaaaaaaccatatctatagctaacttttggtgtctttaatattctttaaagtttcttttcgagatccatcagaagctcttggaactgtgttttcataaaaggattgctgtgctaccaactttactaaatttaatattatagtccttacaaaaaagaaaaagaaaacactctaatattgtaatccaaaaatgtagactggtaactatgtcaatgcaggattatatttggagtattacaatgttttgttagacaaattttggaccaaaatttttttttcacagagatagaagttggttatatcaatttatttttgtcttatgacaataattcctatatagatggaatataacaatattaaattagttttgaaaacgtttaatctcaaattattaatcttttctagcaaaatacaagaaatattcctttttttttaaaaaaagtaaatgtctgaataataactttgtatttaatgaccattattcaaaactaaaaaagataaaaatagatgaataaacccttgataaaatagtaaaacagaatttttgactatataatctttttttttcttttcaaacttatgatgtaagtgcacttctctggctagagtttgatttgtgtattttgttcaaacaagcctttttatgctcattaaaaaattcaaatatcccttcggtgtgcataattaagtactttcactgtttaacttttaacttctatccagtacttatatgttttagtaaaggtttaccagtaatattataaaaatatttttcttttagatttcatatttctataaccaatttatgaagtttgattattatggaaacatgtctagtatcataacaccatcctatgttgtaattttctatagcactatgaaaatattattaaaagtctatgcatagaaatgtacaatactaccattttgtcagatatattttacaaattaaaatggggagaataatataattgataaaccagtagataaaggagaaatcacattgtggaatatacaaaagttcaatatttagttgttgttgttgaataaatttaatagcaacttaatttatgtaagtcgtcataatggtattatcggtatccggtttctatttttttggaaatgaatgttcagcaagatgatttgaacaacataactctttcggtggagaattatgttactaaagcttctcaaagttgttaaattgacttaaataaaaacatgggattttcattgtttaagacagttgattactttgacacagggtctccaaagatttgcaatataacttaatattataatattgttggttagctgttctttacgagtaatgttgaacgtcctaattgttctgtttaactactatcacgattttttttgcaaattttagagagatacattaaagagacgtacatggaattatgcaacacttatataccattaaataactaaggctagtctataatactaaatccttcatttacatcgaaaaattttcagatgcatctcattgaaatattcaaaaataaactacgtgaagttgcgttattactttatcagatatcaagtggaaacaagaattattcaagttggttattagatcactatagtcgagaaaattgctggtgtaatgaccaaggctttatcaaaaggcgtgtttatacaaaagaccgaaacttatttattaaaaaatataaaacaggaagttagcttatagaggcatattgaaatatgtttagaaatgtttctgatggttttaattcattttacaaatagaccaaaagagttataaacgatatctctgatcatattttaatgaaataaaaaagtcattttaatttcttcttaactgcaactcaaggtaagttcaaatagtaaaaaatgtcgaaaacgaattctgtaaagttatttctagatatcaagaactatgtgtaaatagttttttgtagtaattgatcgttttaaataattgcaaaaaaattgtatatattaacatctatgtctatgttatatagtgtttatataatataaaaagtaattattaggaagaaggaagtagaatttacctttaaatatggttataatataataccagtttaattattggattgcaaataacagaacaatcagctggatgatattgctttttagagtcattgcattatttttgatagtagttaagtagatatcgtaggttattacatacatttgtaaatcaatctacggtaatattataagacaacttatctttctagtttattctttgtcttagatgcaaaatggattatttattttgtaagtgcttttttgtcgaaaattagcacctatagtaattggatatatcgtaaatgttctcgatattatagtagatagatatagtgtacaaaattataattaagttcttcagttattttatctatatacaatatacaagaatgattaaaagataataagggaagaaaaaggacatgaaaaaaatgtcggctttatatatttgcatatttgacctatctcgtctacgtgcagcaccaaatggttgataatgtttgtttacatctactgataagcaaacaatacattctccatatgttgttatcaattaatagtttcctaaaatcgaattgatttagctatttattctagaacgttcgacttcagcatttttaaaggttcagggggggggtagaagagagaaatcctctaatattctctaaaattttgtgtattccatttcctgtaaattgtaagaggagttacaacagattagtaagaaaataagatataactatcataatatattgtatatatatatattatatttagtgtcactgaagcgtatcgtaactagaatttatcatgtatactaatctatctatttggggaatagttatctccttctctcccttttctattcttccctttgatatatagaaagagttttcattgttttaaatattgttaaagtaatttcatgctatatttttatcgctcaattgagtatattagttgctgaatatgccattttatttatgattgaagaatatgttacacacaaaaagaagtagatgtagatacaatagttaagggagaagagatgaaagtaagcatatttacataaatagacatatgcatatacacagttatatggtttagtagagtatggcgacatttagttattgtatatctatcaatatatatacgtatcagcttttctatacccacatatatgtatatgcaagggaaagaaagcaaaaaatgaagaatttggaaaataaaaaaatttatgacacttttgtttctaatttctggattatacacctttagtaaacattatggttgtaactgtaggaaaaattattatgttttttgaaatatttatcaagattttttttcaatctctttaaattcagttaataccagatctttaaaattgcaattttttttaattagcaaggttttatacttttaaagttcttaaatcatgctcaatcgactttagcgttatacaatagtaagctaccttatattggaattttttgattaaatatacttgaatgttgagaaatgcctttttttttgtttacttaagcccagataagattaagccgctaaggttatcgaaaattttattgtataacaacactacagttataaataatagacataggaaaccaaatgtaataattcaatttaaaataccttgatggactaatcattgttggttctactatattttaagtaaaattgcatcaggtttgaagactatacaacatcctaacgctgaattagaaaatatattatcgttcatttaagagagtgacgtgttagaacaggataaggatgatttaaaggaaacaaaaaatttaatttcataaatacatgataaaaaaatatgttatttaaaagacttatatcaaatctgttagattacataattgtgttacataattaacattaattgaaattaagagaggaaattattgatttattaagtattatcatatctattcttagtgtataatataactagtaaacaatcatataaataacaaaaataagcgatattactaacattgggatatcatatatgtttatgatagtaatatattaattatatatttatttaggcttcttcattttaaaattgttcacgtgtggacatttcaaataatcataaataataataggccaacgaaatgagcaacactccactttatatatattttattacctttaccttcatatgatacaagagagggtacacttccatgagatagtgtcatagttgttggtgatgaggagaattgctcagaaatatattgggagataggtgtcaccattgttgttgacgatggttttgatcttccagacttaacagtgtctattacagtattagtcattgaaatactatctgtattactatttgtagatccaacaatgatactagcagatgttctatagtttctagatgttggtttattttcattgttagtaaatactggagaggtggatgaagaagcggtggataaaatactagtcttagtagacgattgagatggtttaaaagcagaagataaagacaaataagacgacatcggagaacctgttctggtggagttttgataaataggagctgaaattataactgatgattctctaaaactactaatggcaggtggagtgatcacaacaacaacaacttcagtagaggaggaaccattgctgttggtgactacagttgtgaaggtcgatgtggttggaacagtgactgcaccagtggtggtagtggataaggtagatggagctggggtgatcacgacaacaacaacttcagtagaggaggaaccgttgctgttggtgactacagttgtgaaggtcgatgtggttggaacagtgactgcaccagtggtggtagtggataaggtagatggagctggggtgatcacaacaacaacaacttcagtagaagatgaaccgttgctgttggtgactacagttgtgaaagtagaggtagttggaacagtgactgcaccagtggtggtagtggataaggtagatggagctggggtgatcacaacaacaacaacttcagtagaggaggaaccgttgctgttggtgactacagttgtgaaggtcgatgtggttggaacagtgactgtaccggtggtggtggtatacacagtagattctgcaggtacagcaacatcatagataatttcagtgacagtatatccgtattggttagttgtagatgttgttactgttgaaatagtagtagcttcagtaataaaaccctcagtagtaacagttgttgtctttgtaattggttcagatatccatgcacagtttggaaaataataaaattgctgtatatatataaaggtaccaccaatttgatattgaggatcagatggagtaacaacaaatggattattttgtgtttgccaaccaccatcacaacttgtgttgaaccagtaacggtgaccatctattgcaaaattaatttgtagagatcctggtaaggtgttaaaatttttagcattccatggataatagtcaacacctaagaatacaatcatagactcgattgaattcttgactataagtgagcttggtacaatttttggattaataatatacatacccttgtaaacattgaaggtttgttctccaatattatttgtgttaataagaacaattgacccctgattaccagtaacttcaccttgaccttctataggattattgaaaatgatacctttcatatcatatctactagggatcaaataagatgcttcatttattaagccagcaaacccaccagactttataacaccattatttgttatagcaccaaggtaaaggaacccgtttgtggtcccacctttatcagcagtatcataatcaatagtacctgtgttaatgaaggaaccggttggagctatagtaaaattagtacctggtatagtagcagcagcatttaattgtgaaacagtaaatataccagagttatcaatacttgcaggtgcaataacaaaatcactggcagaacctgccgatttaatattttcgatgttgatgttaccactgtttgtgattgttgtagtagaaccaaattgtaaactagttaacccgtttgttgaatcaccgacgatgtctaaagaacctttaacgtcaatattgccattgaaagaatatgaagaaccagatattaatgcaagagtagcacctgattcaattacgatatcattggaaaacgtttgatcacctgacaaggttgtaggtgccgaaatagttgttgtagcagcacttattttggtcacaagtaaccctagtaaggaccacaaaactaatagctgcattttaaggataacaaatgaataatgtttaattcaatgttattttattttattttatcttagctatttgtttttttttttctcgtcgatttttgtctgtagatgtactgggaaaaaacacgcaagggtaggagtgaaaaataaaaaaaactagaacatttcgagaatcaagatagggaagaaatagagattacttttcaagctgtagacatgtagatatatagataaatacttatatatgtgtgcattttaattatttattacaaacaatcactaatgataccgttaaaaatggaacgagactaaccaataagatctaggtccttgttctggagataaatatacagatatatattatgcatgtataattcgatcatcccaaattggtgtctgggtgatgaaagagatccgcacaccctattgttttctatttctaggtctgtcgagtcctaaaagtaaaatatttgataaatattcacctcttgaagagaaataaagtagggttcattaaaagattccaaattttgtctttctttttcctaagatgttctcatgtaaagtccttttttgttgttactagacatgacaaaatatggaagttagtagatatattctacttgtagaatccagttattgttttcaaatgagagtggaaaggatgcattatctatatttcatttttttttcctctgtgtaataacagaaatcatacatacctatatatcttgttgtttgattactcattctactttagttacctatctactgctttaccttacttaagaacaggaagtgatttgtttaaccaatgggattgttgagttctgctgttaaacatatgaaagaaatagaactattagttttcatgagaaactagatgatatagtattgaggtaaaattgttttcacatatctctaaatgttaatagcactctttcgttaattttttttggagtttgtagcaggaagcaacttgatatatttactcaagtacatctatttatatttataagttcaagagtttttatttatttttatcttattttattcacattttgttgtgtatgatatagtttttatattatatatacagaagaaaaatgcaagactaggttccttttttgaatactaatacctatatgatactttaattctaaagtatattcaagtatttcaatacagaggctgccaattcttgacaaacagatatactggtgagaagcatgaaataagtttaacaaatttattatcaaaaatcaagaatactaccaacggactgtaatatgcatttaagaatttgtaatagtttttttttttcatgatacgttgatgaatcttgtatatatattcttaatatatattttgatttgcttaggtttcgtttttgcgtactctaaacatttcattattagtaggtttgtaatacaggctcttttttttttatatactggatatagggcaagtttttttttccaaaaataagataacagaaaatggaatttttcacaccactccgacatctagcatgaaaatgttgaacaatagcttatacaatataagctattgtatataaagattattgttacgtaacaatgttatttaaagcaaattttagaaaaatttattgttgacttttttttttcaagaaaaatatcggttaacaacatagggacatatttatttattaataatagcatgaataattgtagttccaaaaatttagtacatatttctaaattttttgcatatacataatatcggcaaatagcattcgaggaacataatatttcctggatgttaaattaaacaatgttattttttagaaaaaaataagatgagggcttgaataatcaaagttttattttccttcagatttcttcaacctagcaagattttttaaagtcccttatttaaatgtttctgtagacaagttaaacctggtgtaaagatataataaagaaataatttgattattttttagaactatatggtatacaaacaaagaattggaagcaagtaacgaacacaatatatgtaattactagcattaactctttaagaagaattttattctttgaatttcttttaattttttctaaaatattatcagaacctaaagtatgatgtgtatgttttcaataaaatagtaaaagaaagatttctgccctacatttcaaaattttaaacatttttgaggatataccaaaaatacacattatcttatgatatgatgcctcttttttggggaggtttatggtgtctgaaaaattttaagattagaaaattttgatagaaaacaaaaaaaaaaaatgatgactgacaatttgaaaaccggttttttttttctttttcaaattttgtaattcttttttttttctcatttcctttttggtacattttgaccaattttgactaagagaaatcccttatttttgttttgtcaagaaaatcacagtaatcaacgttttttaaaaagtggaggatctttagtttttctttaaaaatgtttttttgtttgcataaaccctgtattgttttcttaacaaaaagattaatcttgctctttttctgttttaagaaaagtttagagttttttgtcaaccaaagttggtaattaatgtgtatgtcggatatatttgactttagatttcaatctcttcccaagaattgtccccagaactaataaatctggaagtttttttttctcccttaaagaaactttttattttagttagaatataacgagactgagatatttttgtttaaaagtttcatctacagtgaactacacgattctacaattgtacgtaagtgcatctaacttgagttaaggaggggaaaaaaaaggatttttctcaatgaaaaaattttttactacggaactattgtcatatgcgggaaatataatacgggtaacgaaaacaatatgatcgcgaaaaggtaatataaacttcgagaattatcaagatttttcaaaattcaccaaaatgaaaacgtttaaataaacaaacaaatctttttttccggtgtattaacaatagatatatcagtatatttcctaatagctttcataataaacaactgttatacaaataggccgctataggctatttcataaatagtctcgcaatcatgcatttttttttcatttttttcctatttcatttctgacattgaaacagtaataataattagtctataacgtgggatatgttgtatagcatgtatcctttgtcctctttatacataatttatttccttgttgattgctggaatgatgttctaattgtttaggaagtgaatcattatctcaaggaagaaaaatgtgagtactgcataatccagtattctggagataatttccaataaaattaaaataagaaaaaatactataaaaatttatcaaaaaggaaagtgtatataaatgggcaattttacttattaattttctaatctgaatagacaatttaccagaatggtttaaaaggtttaccgtggaagttattatttctgaaattgtcggaaactttgttgtggacatttatagcttttagtaaagcttcatctaactaacctaatttcgttgatgtcccatgaatcattactttactagatttctaaccactgttggttagcttttcaacgtggtttggttttaacaaagtactggattcattttcaaaatattgtgtttttgtacaagtattcagtaaacttgctattggctattagatatctgaaagtagtttactagcaattgatttaatattttagtacttgaactttttgcaaatcagtaataagatatctttcctcccttttggtatatttgaaataaagttacaacaaaatatattactttatgtatagaaaaaaaaagtaaaacccagatcatatctctgttgcccataaatacaggtgtatagggttagatatacattattatttctactcttttgagtaaattggttaatttagtgttcataggcttgttttaacatctgctgatatttctcaaaggagactctatggcgttttgtttttatgtcttcggtattggtgggactgactctggggacatagaatagtagaaaatatgttgcaactctgattgtaatagctgatattttttttcatcagtggttacggtggtttattcattcccaatcacacttgtgtctaagttatggctattaacatatcaactctgaaaatttttctgatcaacataaaaaagattatttattttcgttctttaaaaaaagcaacaaaataagtgttgaaatataattattagagttatgtttgataatctaaattcatcgtactaagtgattaaaaggtatgaaaatttatagtaaagaagattcaaagataaaatgagtatactgtataatattgtatcttgtatattacttatatagaaagaaaaggactaagcaataaaataacaatttatagtaccactaacttcctactataaataataatagaacttataataccaccaatatcctattgtaagttacattatcttattatattagtttaaaatgaactcgactagaatttttgattctgaagccttgcgtcaacaggttatgagccctgtagctacagctgcaggttgtattccaattaaattggacgggaaaaagaactttaaaaaatggataaacatcttagctatgcatatgtctgatatcaatttacactggtatcaatatgcacaaaatggaaagctaaatgttattattgaacaatataatccatctaatgatatgattgcttatattaaaaaattatttgaaacggcattaaaattattaattgttaataatgtcgaaggatctgctaaaaaagaagcagatagatatgttgctggtgattacggtatcccaactggaaaaggtcttctaaatcacttaactgagtgttttggtacagaatctattgatgtagctgcagaacctttctttcagttagctaaagctaggaatttaacattagacgaccagtatgatcttgttaatcgtttagtggaggtcatttttgaaaccacatctagtgaagaaaattttttaaattcattaacttctgcgcaacaagaggctttaagagtcatcaagattaaagctcgtgaaagagctgcttcattatttttaatgagtttatatgatgagtcttaccaaagatttatggatatattcggtaagaatcaggaaattaaattgagagaagtgtatgatgtaattagtaatgctaaaagaggagtaactaactccagttttgttggaagaagaaatcaattcaagcaaaaagttaaaaacttcaattgtaaaagatgcgggggacaacataaaactaatgagtgtccagaatttcaagaatggttaaagaacaaaagaaataaaaatcatgaaaaagattacaagattaataattctcatacggcttggattgcgttgattagcaaacaaaatacaacatcgagaaacgattggtattttgatactggttgtacccagcacatatctcacgaccgttcaatgttttgcgagttagttgaaggagatgagaatgagtttggggttatcgaaggcattggaggtaaaactgctattaaaggtattggtacagtacaactaggacatgtcacattatacaatgtggcatatgttcctgatggcaacgtaaacttgatttctgtcaaaatggcttcttctaaatcaaacatgaaatttatatttgacaaaacaaaggtatatacaattaaaaataataaaattactcaagttggtgaaatgagaaatcaactttatgtttttatgcccaacaataaagaaacaaaaacgatgaacaaaccacttgattatgcttttatttcgtatgaccattctgttttgccatctccaaaggcaaatattccagatgccattaaatggcatgctagagtaggacatccaggtttagctaattataatcgattggcaaatcgaattgacttgcccattatggaagctgataaacactcgttgtgtcccacttgttccctttcaaaaggggtgatgaaaaaaggaaaaatttctgacacacaatatacgagccctttacagctgctacaagttgacatttgtggtcaatttaggtatactaatttttctgatagtaaatattttttgactatccgggatgcctactcaagatattattccgtaattcatttagcatcgaaatcagctgcatgtgataagctgattgaatggatcttagaaactgagaatcatttcaagtcaagagggggatttaaggtgggtgccattcgcacagataatggacgtgaatttatgtctagtaaatttcataatttctgtaaaagcaatggaatttcccatcaattaactgttccatacaatagttttcaaaatggagcagttgagagatctcatcgctcgattgaagaaaaaacaagatgccttttaatcggaggcaaggtacctccttctatgtggacagaggctgtaagtactgctgtatatctcttaaataggttaccagtatctaataaaaattattctatcccttactgtctctggaacaatattcaaacagaaaatctagatttatcacatctacgtatatttggatgtgctgcatatgctacattacctcatcaattacgtgacgggaaatttgctcctactagtgtaaaatgtgtgtttgttggatatgactccaaacacaaagcataccgtctctatcatcctccttctaagaaaatttttgtatcaaaccaagttcgctttgatgaacttgatttcccacttgcaggtaccaaagaagttgaagtggctcatacatttgccactggtactttaggtggtgtcccagtttatccttcatctacggatgttttcaaaacttcatcttctgaaatacaaacgtcaaattattatcctgaaactactgattatcctatatatgaaaacaacttagaaaatgaattaaccaccatacatggtgatgaggttctagatcaaggtactagtcgatactccactccgtatctatcatctgttgattctgattcttttatgtccagagttgattcatctgacaatgataagcacgaatatgactcttcttcccctgatgaatatgaactaccatctacttccttctcttcttctcctatttctacgacttctgactgtgaaaattttactttcaacaaccttgattcatcctctatagacaatgagtcaactgcctcattctcctcacataattctactcaaataaacaagaaggaagcagacgaactatcatcaattgcttcatcctctgatactgactcttcaactactccaacagctgttccagtaactactcaacaattaacatctaccattgatgatacccactccgacacatcttctcctaatctacaatccaaatccttatcaactgataattcaccggtttataacttagaagacttagatccccataaaccattaaaaaatagtaaaattgaattagctgacaatatttccgcccctatcaccacacatgttagcaagttgaatggccaaacatcctcaattgttaatcataacaagttaggtcctattcctgcttctgaattctacttaaatcatcaaattgagaaacaccatccaaagtgggattctaatccaattagtcctggtaaaattggtacccctgctgttgaggctgttaatattgactccggcagttttgttcctatgaactccatggatggtctcacccaactcattagaacaccggtattcccttcttctcaatcatctggctctgatgataactcttcacatcacatagccttgactgcgttggtacatggcatgtcctttacgtctaccactacttctgtcccaaatacattcaaccaggcaatgagttcatcagataaagataaatggtatcaagcctgtctgaaagaacttcaagcttttaaagatcatgatacatataggttgactcctctccctcctggtcgtcgtgccttggggtctcgttgggtgtttaacattaaggacggaaatcggtttaaagctcgtttagtggctcaaggacacactcaaaaagctggcatcgactatcaagaaacctttgctcctgtggtgcggtatgattctgtccgtatctttcttgctatctctgctctccttaatctccgtgttcaccaaatggatgtagacactgccttcttaaattccaaaatggaagagccggtttacgttcgtcaacctccaggttttgttgatcctgtgcatcccaatcacgtgtggcagctttacgggggtatgtacggattaaagcaagccccactactatggaacacgcatattcataaaacattatctaggagaggatttactcgtcatgatggagaatatggtatttattttaaaaatgtagacaactttaaagtattgattgcactttacgttgatgaccttttaattgctgctccaaataaagatattatgaactctgtgaaagcagggttaaacgaagcttattccatgaaagatcttggccctgtttctaaatttttgggaatgaatgtttaccaagataacctgaacaatataaccatctcaatggaggactatattaccaaagctgctcagagctgtcaaatagacttaaataaaaatgtggaatttccattatctaacacagccaattactttgacacagaatctccagcaattgccaatatcactgaataccaaagtattgtaggccagttgctatttgttagcaacgttggacggcctgatgtagctcactctgttcaactactatcacggttcctcaaagatcctagagaggtgcatttaaaaggtgcttacagagttatgcaatatttatataaaaccaaaaaactaggattgtcttataatacaagatccaataaatatcttgaaggattctcagatgcatctcatggaaataagaatgatttgaaacatgcaactggtgggtttattataaaacttgctggtggagtggttacatggtcttccaagaaaattacaagcgcagtttgtctatcatctactgatgcagaatacatttctgctagcaacacaagcagggaattaatttggataaaaaatatgttgaatcacatgaaaatagatgtaaacgaagttaaattatggatagacaatgaacctgccattcacgtagctaaaaaccctgtcttacactcaaaaatgaaacatgttaaccttcactatcatttcatcagacaccaagtagagtctggtattattgaaattggtcacataaatacaactgaacaaattgctgatataatgacaaaagttttaccaagacctgcctttataaaagtccgagatttattcatgaagaaaatagaacaggaatttagcttacgggggtgtgttgaaatataattattagagctatgtttgataatctaaattcatcgtactaagtcctctggctgaataatattagtatacatgttcttagcgtcggtgatcatacaatatgttattattgtgtattattattatattgatatgtagtgtaattttccctcaatctcttgattgggaattaataattatataaatatacaagaaacataaagatacgatgtatatatattattcatccagattggaaaattaataagtaaagttgtctacttatatatgtttaccttttggcaatttttcataatatattaatttattttgattttgtttgatcttatctccataacgttgaatgtgcaaaacaaacatttttcttctttgatatatttacatgttactcaaatcggtaatatatcaatccagcataccacccaaattttggactgctcatacaatccattctgaagttaatttactatatctcttgtatgtcactggttttgtcaaaatatcagcaatattgtttgctgtatctattcttgcaactcttagattattctcacttatctcatctcttatccttaaagcttttatcccaaagaatttatttttaaatgatttatcttctttggaagtaattactgccatagccggttggctatctgtttcaatcgtagtgattattttatctgcagttaattctttaagtaataatttgatgtatttcaacacaggaatagataatccaatagcaccaatttctgcttcagcagttgatgttagagttgtttttgattttgttgatttaccagcgattatattgtcatcaattttaatgtagtaacctagttgagacttgaattccttttgcttagcaaatgatgcatcagcaatagcgtttagcataatttgattttcgttattctttttcttgcaccatataagcttcttctctttagtatcccatagatattgcactaaaagtctagctaattctttaacttctttgtttgggaataatgtgtttgatgcgattacgtttacgtaatataatatgtcataacgatatttgtgagcaacatatgaggctaggccaattattttttgaagccattttacttgtttcttgtactctaatccagatatacttacatagtcttcttcaatatactttcctgggggccctggagctttcaatagtttcccatttttgtttagaggcacatccaataatgggagtttttctcttaaggatttttccataccaaaggatagttccttatcaaacatatagttaacttctaaacctagaatgtcatactctgttttaccttctgtaggtagtcctagatttatgacttttgtatcaaatttttcttgtaactttgatataaaattctctgcgtcagatatttttctggatgtgataatcatatcatcaacgaacaaacataccgtaattttctcatttataaacacacatgaccagcctgatatttcttttaagcaacattttgatgtcaaaaaattggatatctccctgtaccagttagctcctgattgtttcaatccatataaggacttttttaatcgcacgacctttttcttcaaattcatatgcggtggagctcttatatatagttcttcttctaggtcagcataaagatatgcagatgaaatatctaattgagtgatgtatttgtttttatttaaagcatttgaaagtacagtcattagtgcatagtgatgaactgtattggatgttgcttcctcattatatgttcccttcttctgttgatctccccttgctactaatctacatttgtgtgttccatctctttttgtgttgaatatgaacattgtattaattattttcttcttatcaatattcttatcatcgattaattcttcgtcccacgtattcattttttttaactgttcgatttctttttcatatgccaatttatacaaatattttgagtcattattagtattttttattatagcatctctatagtttattgagtgggaggcactatttaattcatttgatctctgattagcacgaatattgcttattttgtattcttttgagaatttcgttaaatattcttcagctttttttgctagtcttgaagcgtctgtgtttttcttactagatggtttcgtaattttagcatcggtatttttaccacccaacacagcgtctttttgtggattagctaaagaagtggaatcaggagatagattggaggaattagataaatttgtaccacccaatggggtgtgctctattggctgggcttgaatgggcgaagtggatgatatagcttcgttttcattatcactttcattttctgatgtatagtcatcagattcataattggagtttgtatgtacgatggaatcaattagattgtcaacttctttaagggtgtcattgttttcagaggagtgttgaactgatggtagtgcggtagtatgtgatggtaattggttctcagtaggaatgtcaattttttctggttcagattctggttcaatgttctcggggtagtcgtggatagcaattagagtgtcgaagactgtggattttggtgtggtgccttttgatggtgaacttttaacgattgaataattggatgtgtcaaccacttttttggtgatggtattatatattaagtatccatgagatactgtggatgggcataatgccaacccgtcgtcaccacgaggagaaagcttggatgttgttgatcctttgtgaataataacttcttgtccaaaaggaagaatagtactcacatccagacctgcaagaccggcttttgctcttgatgaagttttaatagatgagttaaaaaatgcattacgcatgagtgtggcgaattgaacagcataaaaccaagtcgaatttggtaggtttgtagcttgtaaaagtgttcgacaatcgtttaaaaaagttagattaaatcgttctgcaacaccatttgctcgtgaatcaccagcagtagtataaattgggttaatccctttatcttcgaagagtttggttatctgatcgtttgtaaattctgaaccacgatccatttgaaaagataggatgttggtcttgaactgattagacaccatattaatgaactttgaaaatatgcgagtaacattttgtgaatcctttgaatataatggaaaagcccagcgaaaacgagtagattcatcggtaaagctgatgaaataggaaggtgttccgactggtagatgtgacatgggaccgaaaatatcggtatggatatattcaaagggagcatattctttttgatattttatacgagaacctataatatgcttgtgacgagttgattttcctttcatgcaggatgtacatcgaaaggagtgaatgccagaccaatcgacatcagctgatgtgataccagaaatcatctttcgatcaattgtggttttaatatcatgaacattaatatgtccaaataaattgtgtagaaaaggtacagttaatttgatacctaatttgtttatgctgtatgaagtagattgttgattagatggttgtaaaattgatcgaggtatacacatgtacttacccacattaatgatgggagacagaatgtgttccgacttgtctagtaattggcgatgacgagtgtcaactacaataccggctttttccaattggtatgtactaatgaaattgttcgatatgtcaggagcatgaatagcccttataacgtaaggtttggaatgggtttgaaattttagtgatattataccactagcagcagcaggaattggtttgtcatttgcggcatataggacaacgttagcatcggtaatatggtttagaaattctatgtcattaataacagaaatttctgcaccagtgtcaaggactagatagtctttaagattttctggggagtcatcctgtgtgttttcttcaatagggtgctcacattgaatgtttgaaattttctttttattttttggctttttgagttgattggttggcttggtagaagataatgtattggtgtgatgtttggttggataggggtgtggctgacgactatggatgttgataatatcatttaaaatgtcattcaatgtaatgttgtgaaagttacgattgtaattatcaacaattatttgataaggtccgtgtaacgattgtatgatcgtatcacataaaatcctatctggaatagcgatattgtaatcttttgcttgttgtatcatattatttattctttttttaaacaacataggatcacactttgggtcgtaacggatgtgttgtagttgctgatataatttagtaggagtattccttttattgtattttataatggcacattgaattaaatcaaacaaagagacatagttatccgatagttcgtttttgaaccacataggatatgctttagggttaacatataatctaaaaatatgtgttacatgttgtttttcttgatcggtaatggtagattgtgctgtgtttatacatatcttggataagtttatatcatttaaatatttttgaaagttttgtagaaagtctggaaattctgatgggtcagaaacttggtgtagagtaacagttgatatagggttactcgagtatgaagagactgaatgttcatcagtgtcatgtaaggtagggccattagattgtaatggtgtaccatgtgattgtactggtgtcggtggcggtgggaagtataggttaggtggtgggggataataatagtatgggttgaatgcatgtggataacccataggataaggtgggtagtgatacccatgtggatatgatggagtacctgggtatggatatggatatggatatgtggagggaacaaaagaaggagcttgtgtgttttcactagctttgtttgtgttctgtttagtttgttcatatgatccctgaatgccttggatcggagtgactggttcactcttcgatttgatctctgcaaacgaatttttacgaacgctaccatcctctggctgaataatattagtatacatgttcttagcgtcggtgatcatacaatatgttattattgtgtattattattatattgatatgtagtgtaattttccctcaatctcttgattgggaattaataattatataaatatacaagaaacataaagatacgatgtatatatattattcatccagattggaaaattaataagtaaagttgtctacttatatatgtttaccttttggcaatttttcataatatattaatttattttgattttgtttgatcttatctccataacgttgaatgtgcaaaacaaacatttttcttctttgatatatttacatgttactcaaatcggtaatatatcaatccagcactaagtgattaaaagttatgaaaatttatagtaaagaagattcaaagataaaatgagtatactgtataatattgtatcttgtatattacttatatagaaagaaaaggactaagcaataaaataacaatttatagtaccactaacttcctactataaataataatagaacttataataccaccaatatcctattgtaagttacattatcttattatattagtttaaaatgaactcgactagaatttttgattctgaagccttgcgtcaacattttttattttttttaattttttacttttttactttttaactttttaacttttttctttttttcttttttacttttttactttttaacttttttcttttttctttttttattttttatttttttatttttttatttttttatttttttatttttttatttttttatttttttatttttttatttttttatttttttatttttttatttttttacttttctatttttttatttatttctttttttttttattttattttttcttttagttctagtaaaatatccctatacagacatgtataatactaattagttgtagatataagtttttagtaaaaaaataccgcaattccattatactcaggtcaaaataatacttccacatttgaaagttctatggataattttcaaagaaagatcaaaatctccagtttaaaataacaatgcatctaggattggatgcacctgatagcactttattcaagtaaatacaattcagagaaaattctagactcttcttgaaacaagaaaacttaagagagtaatcaggttattttggaaacaatacaatatcatacaaaaaataataggaaaaaaaaaattaaaaatacaaaaatacaaattcttttcctctctaaggctttttacgaacctaatcactgtatactaaaaggaaagttcaaagttcttagaaagtggcaccattttatgtactcttttttccttgaaacacatgccttttggtacaatgccgaacttttaaggatcaaatctgcaggggtgaaatcgtgcctttgttattttactccaattacatgctttcatctgatgttctaataatattttaaagaatatccaaataaaaaacgtattttcttcttgcattattaaggcaagtatcattaatttttacgtattgtattatttttatagcattcttttctgctaatgaaattttgtaaggagtcctaactggaaatcctaagatacgtagtctgtaggtaacacctagtatcgaggcgcagaatttggaacaactgaaactctgagtccaaggttgtgagtatacttgaacgaacaaacgatcgtcggttgaatatttcaaaaaagaactcaataaattctttttaggcaaagaaaccaaaacaaaaaaagtaatattcaagtttttatcctattcttttctagatagaagctattgtatttaacgtccctgaaaaattatagtgcttccaaggtattttccgataatatatgcatgtaaaaaaaatcggagacaggcataaactatttaaaactattattatccatactattattactaaacaagtatgcccctatgttatcagccggtattttttttgagaaaaaaaaggtaacaataaaattttttaaatcttggctaaaatacaatatcacataacaataccagacatatacaatatatgtaaaagtttaaacaataaatcaatatttttgtgccgcttgcggagacggtgcgactaatttcgctctatatcatgttatttctggtaaaaaaaaccttgccctttttacaatgcacaaaaagaaaaagataaaacttcaaagacctatcaattatgaaatagcccaattatgtgaaaatgaaacttaaatcaatgaaatgtgttaagaatattcctctggattaatagtattagtatacatgtctttagcgtcggtgatcatatcatatgttattactaggtattattattatgttaatatgtagagtaattttccctcgatctcttctttgggaattaataattatataaatataaaagaaacataaagatatgatgtatatatattattcatccagattggaacattaataagtaaagtcgtctacttatatatgtttaccttttggcaatttttcataatatattaatttattttcattctgtctgatcttatctctgtaatattgagtgtgcaaaacaaacattttccccttttgatatatctacatgttacccaaacctgtaatatatcatttcagcaaatattgccaatgtcttattgtgattttctatttttttgtcatattagcttataataaataatattaaagtgtttgatactgaagcttggcatcgctagacgtattgtatttttcacatataacaatagttccatgataaaaaaatttttcatcaccaaaattcaatacaaaaaatccggtttttctaaactctagttcagttgttccaatacacaacggtgctgtgctaattggttgtaaatgcatgttaatggtgaaaaatcgtatggtattgttataccccaatcaaatagctgctttgtattcaattatcatatgaaccggttttagggaacaatcaaaatctttatttaaaaaagaagaacaatacgtatggcatcaaataaaccgtacatattttttgtctacctccggatgatgtagtttactggaaattgaaaattgtttttaaagcaaaaacaaaaaaatcggggggaaatcctattgtttcaaaaatagtacaggcttttatacaaaataaccggggggaattttataaaaaaagcaacatctacttttttaaaaacgtctttttttactataaatttttagatcataataagaggagttcttttgtttttccaaatttgtttaggggatgtattagaaaggaaatttgaaacagaaaaataaaaaaaaacaaaaaaagaaagttaaaaacaaaagatttgaaatttcctgtcataaatttcttgttttatctgctaaatttttttcttgaaagacatgttttttatgcatgttcaaaaatttttaaaggttacaattttaaaataacttacttttattaaaaatacatacgctgtaggaaaataattttttatagggttagggctgataattttagatattatgtccattatctgcttcctattctttactagcataacatatagttctaaaaaataattagactgtttcagaacatttaaacgaggaaattttaaaaaaattcttgataggtcaaaaaaaaactcattattcaatcgcggatcttatgtttttctaaaaataacattactcaatctaacattccaaaagtaatgtattcctctgaaattattcgccgatattatgtaaatgcaacaagtaagagagatataccaattttttgaggtaacaattactggtactattttctttcattgttaccgtcatttttattcttttattatttgtcgttttattttattctattatatcattatttgttgagctgctccttggtaagtctttggaaaactatagaagattaaagcactttttttaaactctatttttgcctctctctactccttttcttttcctttcttttttttttgtatgccttaacagtaaaagaaatttttaattctctcgctggatttaccgaaaacactattttatttctattatttccatagtagaaaaaaaaaagttccagaaaaggccaactttgaaagtgttttgtttacagttccttcagaactgttcaacaaatcttatccaaatcgagatattcttgtgcgacaataggacatgcattgcacatttgtttttttttttcattatttttctttgacaaagagatgacataagttctcttatctaattataaagtatttttaccaacaagcatttttaatgaccaagaattttaaaaatcaaatacttttctctgaattcctttattatactaatcgcttttgtatctttttttattttcatctcgacaaaggcaaacctccttgatctcaggggttttaattgttatcaaccgttattatatttttttgtaaaaaaatttgttttctttaccaaaagaacaatacttttaattcaatctacaattttttttgttataaatatcttgatattttttttgttataaatgtcttggtattttttttgttataaatgttttgacatttttttataaatgtcttgatgtttttttattagaacgttcatatttccaaagatagaaaaacaaacgctatcttatttagtcatctcttcttttcgtggaccatttccctttccttcctctttgcttcccacttattatgaatagaacaccacagcttcgaaagcattaaatacaagtgcaattaaaagtttaatcagataataaatctctcgaagtgtctttgctcaaccaacagaaaaagtatacaaatcttttttctctacaaaccaagacattcattcaaaatgcacagtgatatacattcaatcaatagaaattttctctccattctattgcttttttttacggtttttcatatttcgttcgctggtagtatcaccccgcaagcatgcgttatttcaagaaaacttcagccgggtgttactgtccaattctacgaatatccacttgatgatattgtgagttacaatgatccagacttcgcttccagtggttatcggaaatttcattatgttggtgaaataaaaggtgtcgagaatcttaactgggattctggttggcctgtatctgtgcccccatatggttatacgggagttcctattacacactttatgatggtgatcactggttactttattgccccaatgagtggtgtttatactatttccctaggagtggatgattatgtcacttttttctttggtgctggtgcggcatttgattgctgtaatcaaacagagtccttctcctccgatgatgctatgctcacacttacttcgagtaaaagtggtcagttaggaacggctgctcatcaggtgtatatggaggctgggtattcctatccatttaaagctatctatattaacgtgaaacaaagaggtatccttgaaatggctgtccatctacctgatagtactgttgttactgatgttggtagcactatattctcgtatgcagatgatgatgatcagggagagctttgttccgcagttaccattagtcatccttttacaaccgtttacaatactcagtattccacatctgttcaatcttatattgcaggtttgactgcaccaaccactctttctgttatcactacgacatcctggcagaatgatgataatgcaaacgtaaaaatcattccggttgttaatatgccaatggcaacaacatttgttacatactacggatttccagtgagtacctacactgaagtggtagatgtctttaagaacaacggtgttacatctcaggaattagctgtgatattttatactccatatccaaccactttatacactactattacttcagatatcacagttccaactacaactagctatactgttgtagtctataaccaggacgagtatggtaatactgcaatgtttgatgaggttgttgtggaagtgatcaccccatctccatctacttcctacactactaccacaggtccagtttctgttccaatcacaaccacctacacaaccactgtcactgataacaatggctcttcatctccagaggttgttattgtagtggttactccatctccatctaccacctacactacaactactgcagatatttctgctccaacaacatctacttacactactacagtcgttgacaccaatggctcttcatctccagaagttgttgttgtagtgattacaccttctccaagtggtccaactatctataatatcactaaaggtccagtctctgccccaaccacaaccacatacaccactactgttactgatagcaatggctcttcatctccagaagttgttgttgttgtgattactccatctccatctaccacctacaccactactactgcagatatttctgctccaactacaaccacctacataaccactattactgacagcaatggctcttcgtccccagaggttgttgttgttgtgatcactccagccccatctaccttctatacgaccactactggtgatgtctctgccttgaccacatctaccttcaccaccactgttactgatagcaatggctcttcctctccagaggttgttgttgttgtaatcaccccatctccaagtggcccaactatctacaccactactactgcggatgtttctgctccaatcacatctaccttcaccaccactattactaacagcaacggctcttcctctactgaagttgttgttgtcgtgatcaccccagctccatctaccttatccactactacaactggtgcagtcactgttccaaccacatcgaccttcacaactgtagtcaccaacagcaacggttcctcctctactgaagttgttgttgtcgtgatcaccccagctccatctaccttatctaccaccaccactggtgcagtcacagtttcaactacatccacttacacaactgtagtcacagacagcaacggctcttcctctactgaggttgttgttgttgtgatcactccagctccatctaccttatccactactaccactggtgtagtcactgtcccaatcacatctacctacacaactgtagtcactgacagtaatggctcttcctctactgaagttgttgttgttataatcacaccatctccatttagtagctttatgacatcaccaatttctgtaccatctcctctctatggaaactccactatatctggtgaaaagattgaatctactttgagtggcactctagttgttctgactacggttgttaatggagttactatgactacaacttattgtccagaaccatctgcaacttctgaaacaagtatgactgctatcattggacatagttctattgaatctgtttattcaaagaaccaacaagaagagaccaactcactttctgctgcttccaacgcaactccagttatttctgttacttctaccacccctggtccagcatttaccaatggtaaaaatcacccaacatctagaaactctagaacatctaccactgtaatcggtaataatgagtctagaagatcagaaacatcgatgccttcaatggtgccgcaagtttcccaatatattcctgagaaattatcctcatcatcgactgctgttacaatacctcatgggggtataccttctcttgtatcatatgaaggtaaaggtagcaccatgtatatgatgaagtggagtgttgcccattgcattggtttattattattcatggtaatttaaattgattaaaggcaaaaaattttaaaataaagaattctaaataatttaataattaaatatttctatataagtatatagtattctaatattttttatattgtgtatttttattatttatttgattttcaaatatcttatacagcacaaatagatttactcattcctaataaaccgataatatcttctcccaattttaagtaatttaaattattcaatacaattatacaatctaatagttgctatatagacattttaatacatgtatgtttttgctacatgttttggcaatttttaataaagagattgtgattaggaaatttacttctgtataaatcgattgatcatggtttaaaggatgtaaggtctttaaatcttttctaattaagaaaaattgtaattgtgaagatttgatgctagtttaattcaaagatcataataaaaggtttgacacatgtcttaaaaacagttacaatctttctttacctgtatttactgaaaagttaactagacaaatgtatttattcccacattccttaattattttctttctgtcctctgtatatacaaatacatccatagggaacatataatacatacatatatacatggatgtacactaattaaataccactgtatcttgctaagtcaaataactatatatatgtatatttgtgttaatatggtcactgttattaactcgcttaaacttatggttatacttctatttctttcttttttgtaatataatattcaattgtacgtaagctaacatatccaataactattgtactcacatgaacagtagagacatactatagaattactctaacaatatttgaaaaaatggagattccttttaggtagcaaaggaaaaaagggaaagaaagagaaataacatgctatttcccaaatgcagagaattgcacactgatgatatattatacttactctacatgttaagaatattatacacaaaaatgtagatgcacagaatttcgtaatgtaccttcttttgaaaacatatgatatctctttttgtcttttactgggtgtagaactttcaagatttacaagatacaggagaatgtcccctctatatgtgaaagatattgtaataataataataataataattatccaaggattccgataatgtgaaaattttctttttaaataaggaacatgtaaaactatcataacacagtcgtatttttgcaaatgttaattcataaatatagtatgtcttgctattttaatgttataatgggattaaactcttattacttttttttgaatttcaatatcttctcatgactcttggttacaattagagatccatatacagtattagacatccagtcataataatgtcagactaattcttaaagaaagtagatttcctgaatagtaaattgatagattaacatgttaatactccaccatagtatattcttaaatgttgttcaatgttcaaagatcgagataaaatctctttttattacgttatttttcaaacattaaaataagatcatctgaataaaagacacaacaaaaattattgaacagggaaagtagtacagtagaatagaataaagatataatcaaaatattattcattatatcaaatcaatttgtcttttatcattattaccataagcattgaaaatcaaccataaatcaaatccatgtgtaatagattggaattagtgaggataaatatcctggaagatatgagtaaaaagatgatatagtaaatttgtttatggatatagcataattgtatttatgtttataacagttatcattatgtgttaatttcaaaagagtactgcatatgatcataaattattataacactatcattcgatggataatgaagtgatatagaagatataattatatttttcatattgaaaatattagtaagggatagtgttcatgtgttattggagaattcttaaatagtcatatttattatgaaagtagtagtataacagtaaatgaaagtggtatttaataaatagtttccctagttacaatatatgtatggagtaagttcttttgagaatattctctatagctacttatgaatgattattaagtatacagtggtgtaactataccatcttaaatagtggtttagcaatgttcaaagttataccatatagtaagcatatcgtaactgtttatttatggttatatggatctgtattttatatggttgtcgatgagtgtggctattattgttgttaatttttttttcgaactattttttcaaattttgacacaaggaaaattgacaattgaaatttgaatgaaatgagattggtggatagtgaagagatcatgatagctgatgctaagaataattaagtgtgatgtgtttgtgtagtatcgttcttgtctaagacataatatcaaaagaagttgtatattaacaaagagttcatagtttaagagtgataccatacaatctaccagttattaatgtccaaatgaagtaagcagttcaagagtaaagacataattgaaagaaatagtggttgatatgaacttagtctactatgtataaatccatagtaaacatacatgttaatatcatgatagcagatactgtgaataacattgaatgttataggtttaaaagagcaataaaatttactagatgatattactataataaacctagaaatgtagctgcaaatataagatgtgataaaataaccattgatggatcagattaatccagtgtattaagtttgcgttgtttacattgtttctatatcttacacatgaaaagagaatggtcaaaattcattgacttatttatcacaaaataaataactctatcgttgttatttttattgtttcgaaaattgtggttcactcatattttgtaatttaaagaaagagatagtgatatatatgtttcagaaactttttagaaagagctcattgttttgtttaccttggtatagttggtggattaagtataaattgttcatataatcatttgacatgggaaataatttttgctctactcatgggaaaagatatattggacagtttttagagaattatgagaaatattctatgcctaataatacaaaattatcttccagaaaacaagatcgatccaaaaataatctacatgttctatatgcagtgaaagccacaaatttgaaaaatctgcttacgtttttcatttcaaagaagactttgataaatagatttatgttaaacactataccatctttctactgtttatgatcaagcatttatcctatgaaaatatttaaaatgatatttaatttaaataatcttaattgtttatggaagtatagttttgtagatttaacatttgggattagagtctcagggatgctaatatggtatctcctgaactatagtagacttaaagtctaacgttgttatgttttaagtatttagtaaattggatttctcgtttattgaaaacccatgcaaatagtatatattgtatttattattaaatacatattgatctttcacaactttacttctttcaaaaaaattaccaacgatgtaccaaaatcagtttttaacaaaaaattttttgtgaacatgcgatatattatctaattatattatattggacccaactataccataatctaatattgataatcaatcatatcatctatcacaatggatcaaagacctctttaagtaagctttgatataaaatttcctacgtgggttatctgataatcgactacaaatactcacacattcttatttgtattattgacaacatcatgttccagaacatcagatgtgtgaattaaatagttacaacttaataaataagtactcatagtcaacctttagagcctagcataatttttccatatttgcaagttagacaatcaacaaatattattattgttgtttatttattaaaacaggtctcttagcactgtggtttgaaatataaataaagatcacttctctggagaacttgtaacaactctttatttatatataattacaactgtagatatctacaaatttttgtaatgttttgggtcgatcttctcatcacaagattgtatattaaggtattcatgaaatcggatatcttgcttcaatactatttacaaaacgtgaagaattaatactagccaaatagatataaacagaatataaacaacaccctaatacttttgattctcaaaaaacttgtgttttaacaacaatacagccaaaacagcataaattaacatattcaagacctcaagaactataaatatacgaaggattgatatgacattttccaaactttcatgatgattaaaccaaatgcaagaatattattgataaagtattgtcaaaaaaacataaaagaaaaatcaaatattccccatcataccactttaaaagtgttcttagaaacaattcaaaaaacaaataaatacaacagtaatataatcatagattcataaaaacgaataggttctttctgttttgtcttatccttgtagaaaaaaaagattgataaaatgattatctaatggttgctattttgtttattgacgtctaatacaagattttacaaaatatattatcgattgttacgcgtctgcaaatactttcatgtaatagaacttatcctaatgttaacgtaataattttattgttaataagatccatagggatataagaaatttataagatgatgtattgtcgtgataatgaaatacattcacagatatctttatacattcatgttggggatgatatccgaaggtaattcttactatagaataaggccagcaacaacaagttaaaaactatatctgagtataagtaagagtgtttgtataactaatacagaaattatatcaattacagaaaatgaattctttgacaattacccatatacaattcatatttttattctcaagagtactatggtatagttcatttgaaaaagttatgacaactactgttctagaaaattaactgtcagaatgcaatgatctttccaaactcaaaaataagagagaaggaaatactttcagaaatagttttgtggattgtgatttctttgaataatagtaatagtcatagcatatgaataatcattctgtaaattcatagttgcctctcccacacctcacattaacaatatatattttattacagtatattaaagttgttaagaattggtgctcatagtcattggataaataatgaacgttctcaatactgtaattggataaatatatattacaaaattgtattaaagttcttccatcttcttctgtatgtataacacagaaatgataatatgtgaaaagtatgcgggaaaagaaacacgatttgaaaaaatgttgtctttgtgtatgttaaattttgttacttctcttctatgaatggcaaaaatcaagcaagcagtattattaacattttgtgacatgtaagcaacagttcctcagcattccagtggtgtgatatgttggaatctcattgttccatttgtttcattctcaaatattctatttcgacgacataataaaagtaacagtataacacagaaattgttaacattcaacaacaaataatggagttataaaaccacaataatttaactgaacattaataaataatccatatatactaacgtaatgaaagtttaataaactagcgtagcaaagaacactttagataaacttctatccagagaaattgaaatgctaatgtacttcatttaatagttgaattatgataatatctaagaaggtatattgatattttaaaaacacaacatatattatcacactatgaatatataccaattcatgttagaaataaaatataccactgcatattgaaatcttgttttctatttaatgaaagttccaacatcactatttaaagataattactacaagtactcttttcttcttttcttctcttaatctacttttcatctcatcgttgatggaaaaactgctgcagcaaaaaaattctgtgatgacatcgagaaaaaatagttaaaaatttgaaaaaatacaaagcacgtaactgtgttttgactagtatatttctttgtgagtgttaagtaactagtttaaacaatgaatgctacgattagaatatatttcatgttatatctgctagatttctctagtgtggttcactctatactttcccactagccttttgaaaatattttctgtttatttactgtacactagaaagaacgagtatacaagaacactaattataacacttcaagaatgacactgccaatttaaaagtatattagaatatcaatcatccaaggattgaagaataacccggagtaatgactaatgtgcatacaatttgaacaaatacaagcaacgatatttaataaatatattttattgtagttaggttaagtcatataaatactatttctagagactgtatttttgtgatattgcataacaactatacaagaagtaactaatgtgatgttcctaattgcatattccatttgatgaacactatatagggttcttactggttcaaccaatcaaaaagcaaagttgtactagatgaccatattgtaatagaactagttagaatattcacaagtacataccacatgaactatttgaaatattgtgtgttatttttattgagctgagtgggttgcataccttcttagataccatacttatattgtattgaaaaacattaagatataagacagctgacaaatataatagtagtattctataataactacttttttattgtggaaatttcattccaatatataacaatagaagtaacatagaatataaggtataatgaaggcgtgatactttacaagaaataattaaatgtatggaaatatgatgatgtatcagtggtgagaagatacgtttatccaaaggttataatattattatgaataataaacacagaataagttatatgaaacaattattcgaagaagagataatgtaatatatctgaatttcacgaagcaaacagatggatgtgaaaaaatagtagtttggtaaagttgatatttcattgtcataataactcttgaagtaggataagaaatagattttgaaatacaatggtaagaaaagagaacttttaagaattaaataaaaagcaaatgatcaatataaaaaggggtattaagatgttataagagacgataaaataggataaataaagtgatactgttagaataagaaattgattggtaaaagaattaataacagtgtgctaatggagatcactgtctatttataaataaaaacaagattcaaccatgaaatttttgaacaatattagattctcgtgatcatgctttttgaattttattgaactaatttaaagagaaaatacatatagaataggattagatgtaacatagttgagtatattgtattttgttgatgtgcaggaattagtaaatgaaagtgattgttgattgcgaatgcacatgctaattatttccatatgatataaaaagatattactatgcaaatagtatatcaaaaaacaaaacaagatcataattcaacaactgtatggataagaataattgtatattgctagattgtgataaagattaaatcatataaacaaataaagaattataaaggtgttgaagcattttcattgtcaattaaatatggaaataatgtactggcaaaaaatacggtaatctaagtaagtttatattgttgtgtgttcttgttgctagaatcatattactcttgtgtttcttgagatgatatttcagaacttgtaaaatattattattaaaaaatgaaaaaagaagtggactataaaactatgagaaagtaaaaataactgcaggagtggtagttgcttaataagtgcttgttaatagaatgaaacaaatgtggttgatatattgcagatgttgtgatttagtttgacacaacagatctgtaatatgaagtagagtgtaaggagattacattcttgatattgtgataggcgtgaacactaaatgatacttgtatataacgagaaatgatgatatatcaatatgtgatattgaaattgtactgtatattcttaaaaattaatatttaatggataatagtaatgagagagacaaatatatgtggttatatgtgagatcagtaataaaaagaatgttttagagtgtactgttgagatagtatttccagtaagtgtgaagtggaaatggacattcaaaagtaattatataccaaggtgtacatatatttaaataacactactgtgttgtcagtagtatcttatgtatataatctagtattagtggtctgcttcatacgatatattattcttcacacacatggatcctcatactattttataaacatatcaatactgtcaattgatatatacagctccttatatcataatttattaactgtctttataatatatcttaattaaataacagtacttactaaatatactataccatatggaaatataggtctatctaagctgttattttatatattattatggtatatattaatacaaatgaacatataataagtatattgattaatatcccccattgaatatttattacaatatataaaagatatatatatacatagagttgattattataaataggaattaggcgataaactaccaggtaagctaataacttttaagtctgaaacaagttgattcgataatatatatataataattaaagaggaaacgtacagagaatattattcaatcctaacacagttgtattttagctagttagtgtttgatttagttattactattccatataaagaatacttctagtgttagaatttcatgaagaaactaaataatagagataaatgaactgtcttttacacaccattgtctcactatttatacctcatatgaagtgacttgtccgttctacttaatgattaagaaaatgtataatataattggtcttgttattattttgataggccctttatatggatttctatgattcattaacataaagtatatattatcattaaatacaacatacgtttatatataattatttttacaataattttaataaacatataaatatccttgacatgtttaatacttgtaaagatataaattattatatacaataagtaagttgaaatgcttgttcagagaaagatctctaatgttaggtatgagtaaatatgattgttagatcacgttgaaactcaactactgttaataagcttaggtactagaactgtcacaacatatacaattttccatatcatttcgttacgactaacagatggagagtacttaatgatgtaatttgtgatggtattatcagttagtgaacaagaagatacaaaattgaacctgaagaaataataaatatatgttaaaattctagtaatttgtatagtttattaagttttatggtataagtattttatatatgtataaaaatagtttagtattatttatattgcataacacagcattgcttaatatcaaaatatgatacttgatcagacataaaataaattgctattatagggatatactctgtagaagtataataatttattatatgtacaatgaaagcatatagagatgtagttaataaacacctatatgatattagtatggaagaatcaacacgtgatagtatagcatttgttttttaatagataaatttaagattggaatatttaatattatattgatattcatactatgcaagaatcggtttaaaataagtattaaaaactttcaatattatatgaagatatagtaaaagctaataaaaacaaatattatagaaatagatgataatagtatgtgagaattagtataataattattactgaatattgtaggggtgcaatgggattatattgaataagaaaaactatagtgttttacaaagtagttaacataactcaggcagcatttttaatagaagaacaatgatcttctattacgtcattcgtattcacatatctgtgataaactacttggaaatataaaccttgttgtggtttcacttcaaagtatgttggaagagctgttgggaaatggcgttaatagtagatagaaactgaacttttacgaaatgtatacagtggaacaaaacagtaaagatgaagattgggaaatatcatggtgtatgtgtcttgcacacaccgataattgggttcattggatccaatgtgatacagattattaatttccactcttcttttttgattcctattcaccgttattacttttctatcaggttgcagttgttgtatcgtaaactactatctatatgagtttgaattaactatatttgtatatgatagattacaccactttagaagtttcaagtgttcagtgatatgataccaaacgctaccaattgtgataaccttatgattattaacttctgataatagtagacttggaattaatattaatagataacttggatagataaaagatgtagactcactctatatctccagacctaataataaaaatgtaactttaccaatataaccaatattgactaagtaatacatattacataatgggatccatgatctaacttaacactttttttagatctcatatttaattaccaacaattattaatagttaatagctacctggactcttactatatgcattatctatgagacataatagaagttattgttgagaattaacacctttatgtattgaataaaccagatatattctcaactgtattctatgactattatgtagccgcttgtacacaaaattatagtaacattcactttccattttttatgcagaacatgcttttaataatatacaaaaagtgtaaataaaattaaggtatgatacgaggaaatctttagttttatttatatggacatcaagtgattttcctccacgaatagtaaaatatgtacaaatagtttcgttgtttgttatctgttataatctcattttttctatgtatttcattctggaatattttatttcaagagaataagaaaatttatctaagatgttattgacactagcagtcatatgttaattcatggtctctgtatcaaaacctttttaaaaattattataatattaacatgatgaactgatataaacttataatagaatattggtagtatgatgagttctcagtttacttataatagggttggtggtgctgtaaatttatctcatgttgcttagttttttattctacataaataaaatacacgatattgtgtcactcatttaatatgataaatttagattgtcaaagatatctccaattatatttcaataagccacaaacacagcaataccctataacaccacgacaatatctcactagtcagatttatttctacacattatattctcttctctctatcatacatttaatattttgaagtgctatgtgcattaatacatctacttctactgatatcctagtaatagctaccataacattacactacctactacaactatcactttgcacaatactatcttttattgtgtattatgccataccatagcaaacaatatagaatagccacttattcattcttacacgactttcttgatctagacctactggttagttaatataacactgcttgtagaactgtaactgccaacatatgctaaaattgtcttcttatcttttcattctttttcttttctgaaatccaatttttcttaaattccaaaaacttttttcaatcaaataaaaacaactcaaacagatatcaaccactacaccatgcaaacaacattaaaaagacttgcttacagatgacaacacatcctcagttgagatctatgcacttcacaaattcacattatataacattgagatactaccattcaacatgatataactatgccataaatatatttgatacagccaaccaagatatccttaactatagagagtatattcacgacaatccactttgtacatggattattactaaggaagatatttataaacaaaatacatctatctttatggtatgatcactctattgctatgagtatttacaaatacataaacacaaacacttacagtatcttccacctaaatgatataatctgataacatatcaatttcacatagtgatcacttcaatactactaccatgaaacctatccatatagatgaacctcacagtataattatcaacactatgccaactaccatcgtactactacccaactacatcacaaatattacatccaaatcactcacaaaaatacaccctaccaataactaagattatatttcttcctgaaaatcaattcattattactgactgtcaagtggtaaaattccataacactgttgtcagttcttacaacaccaacataatatccaacaatcaacagtattaaatcaaataatacacatgtatgaacttgtaaatatattgtaattaaaaacaaaaatggtttaagtgtgggatacacaacaaaaagtaggttttgtgctgatctgtaggaattattttatctgagttaccatatttatatacaattgggaaaggtagaatagtatttgttttgagtattactatcaaatgataagttgatttttcctactttatacagtgttatctaacttattcaaacaaagaaccttagtttagcttgagtaatcaatttacaagatgttatgagatatttaatacaatgaaacaggaagtttttttctatgaaccagcagctttcaacaaatgtctagtgtttcttttgttatgaccatcttttgtggataaaaattaatgtcatatagtgtattaatgctatgagttatatgcagatcaggtgtaaagttttttattgtgcttttatatgatttcactctctggcttttgaacatatactgaatgatatccaatacagttacgtgaattatcctctagtcatttttggtttagttctgtaatgaattgcacaacatcaatactttcccaattcaaatgtttttagttgtaattactacctagtcaactagtgataatacaaaaccatctgctgttagaatattgaaatttacaatgatgatgtcattaaataacgaaaaataaatttggagacatactaaatttttatgaaggtttataccaataccagtagatgccattcctgttggaaattaaacaactgttaccacatgatttattaacaatcaagttattttatttgtacatctgtatgtattgaaatgattaaaagttgaaatgttctttgattaattaaaatttactgaatttgaaaaagataaagattgagaaagagttaggggtatagtatatagagacctgtttgagttggtgtattacataagccagaaatgtttgacttgttagatagtaagatgttatttaggatagttgtaatgataattttggatatgttacctgatgatcaaacaaacatattaatatataaatttctattaagagtataaaagcattctaaataatgatagctttcttggttggaatataaataattaataatattaataacaccaaaaatatattcagtaagtaatagtagcgggtttaattattgttcatatagattgttatctttgtctatctcattgtcatagtgttatattagtattgggataatcaaagagatcattttaatataatgaattgtagtatcgcaaataattctgttaaattaatacaattaataatctactagtgtgatgtttataatgtagaatataattatagatacattattggaagagttgttaaatcatttataacagattagatagtttgaaacatgttagttatgttcttgttctaatacttatattcatattggtaatattacagttaagatccaagatagcacacattttagagtagataacaaaacagtcctagtataataattaataagttattatacatattcagagtttgtttatattatttattatccagaatgtttaaggttgcaatttatttcaagatttatgctgctatgtctaacaaagagtaataaaattatcagatgactgggatatgaatagaataaataatgttcatttctaagccataaaatacaattaatatatccatgtaagtttgaagattcattatttattcctgttatcatttcatagtcagttgatattctgttcatatgataatcattaaacatacaataaaataataggcaatcatttcttttagactgaagatattgatgggaagtgtttggatattcttagataatcatatttataaagaagtaatatcattgatggatatcttccctaatgatggtatatgtattaagtaggttgtctatagcttaaaatatcccagttggttgtattgagtataggtaaatataagatggcataatcacattatatcaaataatggtttgctaatgttcaaagttatatcatatgaaagtgagtggatcatagttgatcgcttacaaaccagtgtgtctatcctgtttacatatctgttggagtggttgttattgttgttgattcttgcaaaatattttttcagattttaaaaaaagtaaggtgatcttggatgggattgatagtcaagaggtgatggtatgtgatattgagagtaatcgagtaaaatgtgatgtaatatatatcgatgatagttataaaaaaggaatatgagatatcagtataagaagacctgtttaaattaagttaagagtaaacaattcatcagtacaatttgttatgttattttcatttaatgtgaatgtgttttatatcgatggtaaatgcatagtctaacagtgatgttatagagttattaagtgaataaaaatataattaaagttagtcgattgttaagaccagttcagttcaagtagatgttaatgttgtaaataatgttgtatgttatgaaatacattgtttcaaaaaattgtattagagatcattagtgatattatcatagtaaacatggatataagtattaaacatcatagtaaattgcaatctagagtaattgtggtatgctatactggaatatgatatatcaatgtaatatttaatacagttattgaataggaataaagacagttcagagaatacagaaaaggtttgtgaaactgtattaaagtagttgtattatcagctgagaatgtatattcatgtctagcttatattttatcatgatgctaaggtgaatacaaaatagttcaatacatcacatctctctttcaattgatgaaagatacttccatgttttctttttttttggttttcatattttcattccttcatgtttgaaaaaagagaaagccatttggaaatgcaaatttgttctgctaaattttcacaaaaatatttccacggcctcgaggaatttgtgattttctgtgaaattcaaaaaggggagttggaaaaacaaaaacaaaatgagttgttccgtggaaaaataaaggttccgcggaaaaaacaacatgggacagagaattgatggtgtcacgaggaagagaacagagacgtaaggaagggtaatatagagaatacatttggtaatgtatatatgtatcgagagctagagagtagtagaatctggtggtggttataaaaatgttgaaatagaatatttataaatttggaaaatggagagtgaaattattatgtagttaaaaaaagataggattggtatggaaacaactacgcgattgcacctttttttgtattaaatatttaagacagagtgagtgtctatatatattgcaattgttgagaatgagcacctttatttggatatatagtaaacattctcaatattatattaaacagatttagtatacaaaattataataaagttcttcactttctttctctatatacaacatagaagtaataatacacaaagattgtaaataagataaaaataatgtatgatgaaatccttggctttatatatgttaacattcagccactttcctctacgaacagtaagatatttattaaacaaactcaacaacctttggttacctctcaacgattattactcaacaatttatcatttagtgtctgctaaaatcttattgttctatctatttcattatagaacattctatttcaacacaatattatgcttagattcttcgaatatatgtaaaatacagcgatgatagtatgtaaaacgtatacaagaaaagaaacaaagcataaaaaaattgttggcttcacatatttttttatccgtgatatcccttctagggctagaaaaaaatgctaatttgttttgtttatatctaccaataaataaacaatacacactctgcattttgatatatatttatatttgctgaaatataatcggtctatctatttactccagaatattctatttctaaaaaaaatcatacgatatatttgttatgttagacttttttgatcctctatacgcataccattcgtattattgtaataagcatagatggataatctttttatctttgttctttctttagatagttctttttttattgtaaaaagtttttcttaattcaacaaacatttcttgtttaaataataaatttgcagctattataatataacacactttacaaaccagcaaagtaaatgtagaattattgttaatatacgataaaatttttatttacaaacttaacagtcacttttaaatcagtgttaaagagtttcaataaaacaataagtaaatccatattctggatcatgtgttgttttcatatctccgttttttacagttttttttctttttaaaatttgtccactaccctggtgctgttttattatcattgcaagacaactatcagatcagcttcaaaaagcatcgaaattgtaaccagatagatccatttaacatcttatttttgtctatttttcctttaacttaatatacagacaaaagaattaagaaagtattgcacctgagaaaacaaaaatgaaaaaataagagtgcagattaatttattttattgccattcaaaatgaagtaatttggacaaataacttagtatctataaatcccaagggtatattgaacctaaaaaaaataaaaaatttactggtccttaatataatcactgccttttcacgattacataaggaagaaagaaaatgccttgtattatttctattatagcaatttttttaatgtaaagattctaacatcatctatcctctagatgaataacattagtatacatgtctttagcgtcggtgatcatactatatgttattattgtgtattattattatgttgatatgtagtgtaattttccctcgatttctcaattgggaattaacaattatataaatacaaaagaaacaaatgatagaatgtatataaattatccatccatattggaaattaataagtaaagtcgtctacttatatatgtttaccttttggcaatttttcataatgtattaatttattttcattctgtttgatcttatctctgtaatattgaatgtgcagaacaaatatttttcctctttgatatattcttttgttttgcaaacaggtaatatatgattccagcatattaatgacatatttatgatggtattataaattagtaaacaagacaatacaaaataaaacctgaagatataataaatatatattatatttctagtcatttatctacttaaagatgttggtataactattttacgctcatataaatacagctaagtattatttatattgcataatacagcattggttcatgccaaaatatgatacttgatatagtataagataaatagctaataatttattatgagtagttattactatctatcttgcttaaaagaaccattatcattagattagtgattaattgtacttttaagagatgtgtgtctatatattgaataactataacttagatataaacaacactcagtgcaca
